(19) United States
(12) Patent Application Publication
(10) Pub. No.: US 2019/0390219 A1
(43) Pub. Date: Dec. 26, 2019

(54) INSECTICIDAL COMBINATIONS OF PLANT DERIVED INSECTICIDAL PROTEINS AND METHODS FOR THEIR USE

(71) Applicant: PIONEER HI-BRED INTERNATIONAL, INC., JOHNSTON, IA (US)

(72) Inventors: CHAD THOMAS BARRETT, JOHNSTON, IA (US); XU HU, JOHNSTON, IA (US); ALBERT L LU, WEST DES MOINES, IA (US); LAURA J RUTTMAN, WEST DES MOINES, IA (US); GUSUI WU, FOSTER CITY, CA (US)

(73) Assignee: PIONEER HI-BRED INTERNATIONAL, INC., JOHNSTON, IA (US)

(21) Appl. No.: 16/481,739

(22) PCT Filed: Jan. 22, 2018
(86) PCT No.: PCT/US2018/014682

§ 371 Date: Jul. 29, 2019

Related U.S. Application Data
(60) Provisional application No. 62/456,227, filed on Feb. 8, 2017.

(51) Int. Cl. C12N 15/82

(52) U.S. Cl. CPC C12N 15/8285; C12N 15/8282

(57) ABSTRACT

Compositions and methods for controlling pests are provided. The methods involve transforming organisms with a nucleic acid sequence encoding a silencing element and an insecticidal protein. In particular, the nucleic acid sequences are useful for preparing plants and microorganisms that possess insecticidal activity. Thus, transformed bacteria, plants, plant cells, plant tissues and seeds are provided. Compositions are insecticidal nucleic acids and proteins of bacterial species. The sequences find use in the construction of expression vectors for subsequent transformation into organisms of interest including plants, as probes for the isolation of other homologous (or partially homologous) genes. The pesticidal proteins find use in controlling, inhibiting growth or killing Lepidopteran, Coleopteran, Dipteran, Hemipteran, fungi and nematode pest populations and for producing compositions with insecticidal activity.

### CROSS-REFERENCE TO RELATED APPLICATIONS

[0001] This application claims the benefit of International Application No. PCT/US2018/014682, filed on Jan. 22, 2018, which claims the benefit of U.S. Provisional Application No. 62/456,227, filed Feb. 8, 2017, each of which is hereby incorporated herein in its entirety by reference.

### REFERENCE TO SEQUENCE LISTING SUBMITTED ELECTRONICALLY

[0002] The official copy of the sequence listing is submitted electronically via EFS-Web as an ASCII formatted sequence listing with a file named “7418USPSP_Sequence_Listing” created on Feb. 7, 2017, and having a size of 5196 kilobytes and is filed concurrently with the specification. The sequence listing contained in this ASCII formatted document is part of the specification and is herein incorporated by reference in its entirety.

### FIELD

[0003] This disclosure relates to the field of molecular biology. Provided are certain stacks of novel genes that encode encoding IPD079 polypeptides and silencing elements. These pesticidal proteins, the RNAi traits, and the nucleic acid sequences that encode them are useful in preparing pesticidal formulations and in the production of transgenic pest-resistant plants.

### BACKGROUND

[0004] Biological control of insect pests of agricultural significance using a microbial agent, such as fungi, bacteria or another species of insect affords an environmentally friendly and commercially attractive alternative to synthetic chemical pesticides. Generally speaking, the use of biopesticides presents a lower risk of pollution and environmental hazards and biopesticides provide greater target specificity than is characteristic of traditional broad-spectrum chemical insecticides. In addition, biopesticides often cost less to produce and thus improve economic yield for a wide variety of crops.

[0005] Certain species of microorganisms of the genus Bacillus are known to possess pesticidal activity against a range of insect pests including Lepidoptera, Diptera, Coleoptera, Hemiptera and others. Bacillus thuringiensis (Bt) and Bacillus popilliae are among the most successful biocontrol agents discovered to date. Insect pathogenicity has also been attributed to strains of B. larvae, B. lentimorbus, B. sphaericus and B. cereus. Microbial insecticides, particularly those obtained from Bacillus strains, have played an important role in agriculture as alternatives to chemical pest control.

[0006] Crop plants have been developed with enhanced insect resistance by genetically engineering crop plants to produce pesticidal proteins from Bacillus. For example, corn and cotton plants have been genetically engineered to produce pesticidal proteins isolated from strains of Bt. These genetically engineered crops are now widely used in agriculture and have provided the farmer with an environmentally friendly alternative to traditional insect-control methods. While they have proven to be very successful commercially, these genetically engineered, insect-resistant crop plants provide resistance to only a narrow range of the economically important insect pests. In some cases, insects can develop resistance to different insecticidal compounds, which raises the need to identify alternative biological control agents for pest control.

[0007] Accordingly, there remains a need for new pesticidal proteins with different ranges of insecticidal activity against insect pests, e.g., insecticidal proteins which are active against a variety of insects in the order Lepidoptera and the order Coleoptera including but not limited to insect pests that have developed resistance to existing insecticides.

### SUMMARY

[0008] In one aspect compositions and methods for conferring pesticidal activity to bacteria, plants, plant cells, tissues and seeds are provided. Compositions include stacks of nucleic acid molecules, including nucleic acid molecules encoding IPD079 polypeptides, vectors comprising those nucleic acid molecules, and host cells comprising the vectors. In some embodiments, stacks of nucleic acid molecules, include nucleic acid molecules encoding IPD079 polypeptides and one or more silencing elements. Compositions also include the pesticidal polypeptide sequences and antibodies to those polypeptides. The nucleic acid sequences can be used in DNA constructs or expression cassettes for transformation and expression in organisms, including microorganisms and plants. The nucleotide or amino acid sequences may be synthetic sequences that have been designed for expression in an organism including, but not limited to, a microorganism or a plant. Compositions also comprise transformed bacteria, plants, plant cells, tissues and seeds.

[0009] In another aspect isolated or recombinant nucleic acid molecules are provided encoding plant derived perforins, including amino acid substitutions, deletions, insertions, fragments, and combinations thereof. In particular, isolated or recombinant nucleic acid molecules are provided encoding IPD079 polypeptides including amino acid substitutions, deletions, insertions, fragments, and combinations thereof. Additionally, amino acid sequences corresponding to the IPD079 polypeptides are encompassed. Provided are isolated or recombinant nucleic acid molecules capable of encoding IPD079 polypeptides of SEQ ID NO: 2, SEQ ID NO: 4, SEQ ID NO: 6, SEQ ID NO: 8, SEQ ID NO: 10, SEQ ID NO: 12, SEQ ID NO: 14, SEQ ID NO: 16, SEQ ID NO: 18, SEQ ID NO: 20, SEQ ID NO: 22, SEQ ID NO: 24, SEQ ID NO: 26, SEQ ID NO: 28, SEQ ID NO: 30, SEQ ID NO: 32, SEQ ID NO: 34, SEQ ID NO: 36, SEQ ID NO: 38, SEQ ID NO: 40, SEQ ID NO: 42, SEQ ID NO: 44, SEQ ID NO: 46, SEQ ID NO: 48, SEQ ID NO: 50, SEQ ID NO: 52, SEQ ID NO: 54, SEQ ID NO: 72, SEQ ID NO: 74, SEQ ID NO: 76, SEQ ID NO: 78, SEQ ID NO: 80, SEQ ID NO: 82, SEQ ID NO: 84, SEQ ID NO: 86, SEQ ID NO: 88, SEQ ID NO: 90, SEQ ID NO: 92, SEQ ID NO: 94, SEQ ID NO: 56, SEQ ID NO: 58, SEQ ID NO: 60, SEQ ID NO: 62, SEQ ID NO: 64, SEQ ID NO: 66, SEQ ID NO: 68, SEQ ID NO: 70, SEQ ID NO: 96, SEQ ID NO: 98, SEQ ID NO: 100, SEQ ID NO: 102, SEQ ID NO: 104, SEQ ID NO: 106, SEQ ID NO: 108, SEQ ID NO: 110, SEQ ID NO: 112, SEQ ID NO: 114, SEQ ID NO: 116, SEQ ID NO: 118, SEQ ID NO: 120, SEQ ID NO: 122, SEQ ID NO: 124, SEQ ID NO: 126, SEQ ID NO: 128, SEQ ID NO: 130, SEQ ID NO: 132, SEQ ID NO: 134, SEQ ID NO: 136, SEQ ID NO: 138, and SEQ ID NO: 140, as well as amino acid substitution variants, deletion variants, insertion variants, fragments thereof, and combinations thereof. Nucleic acid sequences that are complementary to a nucleic acid sequence of the embodiments or that hybridize to a sequence of the embodiments are also encompassed.

[0010] In another aspect isolated or recombinant IPD079 polypeptides are provided including but not limited to the polypeptides of SEQ ID NO: 2, SEQ ID NO: 4, SEQ ID NO: 6, SEQ ID NO: 8, SEQ ID NO: 10, SEQ ID NO: 12, SEQ ID NO: 14, SEQ ID NO: 16, SEQ ID NO: 18, SEQ ID NO: 20, SEQ ID NO: 22, SEQ ID NO: 24, SEQ ID NO: 26, SEQ ID NO: 28, SEQ ID NO: 30, SEQ ID NO: 32, SEQ ID NO: 34, SEQ ID NO: 36, SEQ ID NO: 38, SEQ ID NO: 40, SEQ ID NO: 42, SEQ ID NO: 44, SEQ ID NO: 46, SEQ ID NO: 48, SEQ ID NO: 50, SEQ ID NO: 52, SEQ ID NO: 54, SEQ ID NO: 72, SEQ ID NO: 74, SEQ ID NO: 76, SEQ ID NO: 78, SEQ ID NO: 80, SEQ ID NO: 82, SEQ ID NO: 84, SEQ ID NO: 86, SEQ ID NO: 88, SEQ ID NO: 90, SEQ ID NO: 92, SEQ ID NO: 94, SEQ ID NO: 56, SEQ ID NO: 58, SEQ ID NO: 60, SEQ ID NO: 62, SEQ ID NO: 64, SEQ ID NO: 66, SEQ ID NO: 68, SEQ ID NO: 70, SEQ ID NO: 96, SEQ ID NO: 98, SEQ ID NO: 100, SEQ ID NO: 102, SEQ ID NO: 104, SEQ ID NO: 106, SEQ ID NO: 108, SEQ ID NO: 110, SEQ ID NO: 112, SEQ ID NO: 114, SEQ ID NO: 116, SEQ ID NO: 118, SEQ ID NO: 120, SEQ ID NO: 122, SEQ ID NO: 124, SEQ ID NO: 126, SEQ ID NO: 128, SEQ ID NO: 130, SEQ ID NO: 132, SEQ ID NO: 134, SEQ ID NO: 136, SEQ ID NO: 138, and SEQ ID NO: 140, as well as amino acid substitution variants, deletion variants, insertion variants, fragments thereof, and combinations thereof. In some embodiments, a composition comprises an isolated or recombinant IPD079 polypeptide disclosed herein and one or more silencing elements. In a further embodiments, the silencing element targets a polynucleotide sequence as set forth in any one of SEQ ID NOs: 1279, 1280, 1337, 1338, or 1341.

[0011] In another aspect methods are provided for producing the polypeptides and for using those polypeptides for controlling or killing a Lepidopteran, Coleopteran, nematode, fungi, and/or Dipteran pests. The transgenic plants of the embodiments express one or more of the pesticidal sequences disclosed herein. In various embodiments, the transgenic plant further comprises one or more additional genes for insect resistance, for example, one or more additional genes for controlling Coleopteran, Lepidopteran, Hemipteran or nematode pests. It will be understood by one of skill in the art that the transgenic plant may also comprise any gene imparting an agronomic trait of interest.

[0012] Compositions and methods provided in certain embodiments include silencing target polynucleotides or active variants and fragments thereof of US Patent Application Publication No. US2014/0275208 and US2015/0257389 are provided. Silencing elements designed in view of these target polynucleotides of International Application Publication No. WO 2016/205445, US Patent Application Publication No. US2014/0275208, and US2015/0257389 are provided which, when ingested by the pest, decrease the expression of one or more of the target sequences and thereby controls the pest (i.e., has insecticidal activity). In certain embodiments, a silencing element as disclosed herein targets any one of SEQ ID NOs: 1279, 1280, 1337, 1338, or 1341.

[0013] In certain embodiments, a stack is provided comprising a polynucleotide encoding a IPD079 polypeptide disclosed herein, and a polynucleotide encoding a silencing element. In a further embodiment, the silencing element comprises a double stranded RNA. In some embodiments, the silencing element targets a RyanR, a Pat 3, an HP2, an RPS10, an Snf7, A V-ATPase, Coatamer subunit alpha, Coatamer subunit gamma, a MAEL, a BOULE, or a NCLB gene, including any one of SEQ ID NOs: 1279, 1280, 1337, 1338, or 1341.

[0014] The compositions and methods of the embodiments are useful for the production of organisms with enhanced pest resistance or tolerance. These organisms and compositions comprising the organisms are desirable for agricultural purposes. The compositions of the embodiments are also useful for generating altered or improved proteins that have pesticidal activity or for detecting the presence of IPD079 polypeptides.

### BRIEF DESCRIPTION OF THE FIGURES

[0015] FIG. 1 shows a graph representing the nodal injury score of western corn rootworm feeding on four TO plants expressing either a stacked construct comprising a polynucleotide encoding a IPD079 polypeptide (SEQ ID NO: 56) and a polynucleotide encoding a COATG silencing element (SEQ ID NO: 1322), or negative control line, HC69.

### DETAILED DESCRIPTION

[0016] It is to be understood that this disclosure is not limited to the particular methodology, protocols, cell lines, genera, and reagents described, as such may vary. It is also to be understood that the terminology used herein is for the purpose of describing particular embodiments only, and is not intended to limit the scope of the present disclosure.

[0017] As used herein the singular forms “a”, “and”, and “the” include plural referents unless the context clearly dictates otherwise. Thus, for example, reference to “a cell” includes a plurality of such cells and reference to “the protein” includes reference to one or more proteins and equivalents thereof known to those skilled in the art, and so forth. All technical and scientific terms used herein have the same meaning as commonly understood to one of ordinary skill in the art to which this disclosure belongs unless clearly indicated otherwise.

[0018] The present disclosure is drawn to compositions and methods for controlling pests. The methods involve transforming organisms with nucleic acid sequences encoding plant derived perforins and one or more silencing elements. The compositions and methods involve transforming organisms with nucleic acid sequences encoding IPD079 polypeptides and one or more silencing elements. In particular, the nucleic acid sequences of the embodiments are useful for preparing plants and microorganisms that possess pesticidal activity. Thus, transformed bacteria, plants, plant cells, plant tissues and seeds are provided. The compositions include nucleic acids sequences or perforins of plant species and one or more silencing element. The nucleic acid sequences find use in the construction of expression vectors for subsequent transformation into organisms of interest, as probes for the isolation of other homologous (or partially homologous) genes, and for the generation of altered plant derived perforin, particularly IPD079 polypeptides, by methods known in the art, such as site directed mutagenesis, domain swapping or DNA shuffling. The plant derived perforins find use in controlling or killing Lepidopteran, Coleopteran, Dipteran, fungal, Hemipteran and nematode pest populations and for producing compositions with pesticidal activity. Insect pests of interest include, but are not limited to, Lepidoptera species including but not limited to: Corn Earworm, (CEW) (Helicoverpa zea), European Corn Borer (ECB) (Ostrinia nubilahs), diamond-back moth, e.g., Helicoverpa zea Boddie; soybean looper, e.g., Pseudoplusia includens Walker; and velvet bean caterpillar e.g., Anticarsia gemmatalis Hübner and Coleoptera species including but not limited to Western corn rootworm (Diabrotica virgifera)—WCRW, Southern corn rootworm (Diabrotica undecimpunctata howardi)—SCRW, and Northern corn rootworm (Diabrotica barberi)—NCRW. The IPD079 polypeptides and silencing elements find use in controlling or killing Lepidopteran, Coleopteran, Dipteran, fungal, Hemipteran and nematode pest populations and for producing compositions with pesticidal activity.

[0019] By “pesticidal toxin” or “pesticidal protein” is used herein to refer to a toxin that has toxic activity against one or more pests, including, but not limited to, members of the Lepidoptera, Diptera, Hemiptera and Coleoptera orders or the Nematoda phylum or a protein that has homology to such a protein.

[0020] In some embodiments the IPD079 polypeptides include amino acid sequences deduced from the full-length nucleic acid sequences disclosed herein and amino acid sequences that are shorter than the full-length sequences, either due to the use of an alternate downstream start site or due to processing that produces a shorter protein having pesticidal activity. Processing may occur in the organism the protein is expressed in or in the pest after ingestion of the protein. In some embodiments, a silencing element targets a polynucleotide as set forth in SEQ ID NOs: 1279, 1280, 1337, 1338, or 1341.

[0021] Thus, provided herein are novel isolated or recombinant nucleic acid sequences that confer pesticidal activity. Also provided are the amino acid sequences of IPD079 polypeptides. The protein resulting from translation of these IPD079 polypeptide genes allows cells to control or kill pests that ingest it.

[0022] Nucleic Acid Molecules, and Variants and Fragments Thereof

[0023] In some embodiments isolated or recombinant nucleic acid molecules comprising nucleic acid sequences encoding plant derived perforins and silencing elements or biologically active portions thereof, as well as nucleic acid molecules sufficient for use as hybridization probes to identify nucleic acid molecules encoding proteins with regions of sequence homology. One embodiment pertains to isolated or recombinant nucleic acid molecules comprising nucleic acid sequences encoding IPD079 polypeptides or biologically active portions thereof, as well as nucleic acid molecules sufficient for use as hybridization probes to identify nucleic acid molecules encoding proteins with regions of sequence homology. As used herein, the term “nucleic acid molecule” refers to DNA molecules (e.g., recombinant DNA, cDNA, genomic DNA, plastid DNA, mitochondrial DNA) and RNA molecules (e.g., mRNA) and analogs of the DNA or RNA generated using nucleotide analogs. The nucleic acid molecule can be single-stranded or double-stranded, but preferably is double-stranded DNA.

[0024] An “isolated” nucleic acid molecule (or DNA) is used herein to refer to a nucleic acid sequence (or DNA) that is no longer in its natural environment, for example in vitro. A “recombinant” nucleic acid molecule (or DNA) is used herein to refer to a nucleic acid sequence (or DNA) that is in a recombinant bacterial or plant host cell. In some embodiments, an “isolated” or “recombinant” nucleic acid is free of sequences (preferably protein encoding sequences) that naturally flank the nucleic acid (i.e., sequences located at the 5′ and 3′ ends of the nucleic acid) in the genomic DNA of the organism from which the nucleic acid is derived. For purposes of the disclosure, “isolated” or “recombinant” when used to refer to nucleic acid molecules excludes isolated chromosomes. For example, in various embodiments, the recombinant nucleic acid molecule encoding IPD079 polypeptides or a silencing element can contain less than about 5 kb, 4 kb, 3 kb, 2 kb, 1 kb, 0.5 kb or 0.1 kb of nucleic acid sequences that naturally flank the nucleic acid molecule in genomic DNA of the cell from which the nucleic acid is derived.

[0025] In some embodiments an isolated nucleic acid molecule encoding a plant derived perforin or IPD079 polypeptide or silencing element has one or more change in the nucleic acid sequence compared to the native or genomic nucleic acid sequence. In some embodiments the change in the native or genomic nucleic acid sequence includes but is not limited to: changes in the nucleic acid sequence due to the degeneracy of the genetic code; changes in the nucleic acid sequence due to the amino acid substitution, insertion, deletion and/or addition compared to the native or genomic sequence; removal of one or more intron; deletion of one or more upstream or downstream regulatory regions; and deletion of the 5′ and/or 3′ untranslated region associated with the genomic nucleic acid sequence. In some embodiments the nucleic acid molecule encoding a plant derived perforins or IPD079 polypeptide of the disclosure is a non-genomic sequence.

[0026] A variety of polynucleotides that encode plant derived IPD079 polypeptides and related proteins are contemplated. Such polynucleotides are useful for production of plant derived perforins and IPD079 polypeptides of the disclosure in host cells when operably linked to suitable promoter, enhancer, transcription termination and/or polyadenylation sequences. Such polynucleotides are also useful as probes for isolating homologous or substantially homologous polynucleotides that encode plant derived perforins and IPD079 polypeptides or related proteins.

[0027] Polynucleotides Encoding IPD079 Polypeptides

[0028] One source of polynucleotides that encode plant derived perforins and IPD079 polypeptides or related protein is a fern or other primitive plant species. One source of polynucleotides that encode IPD079 polypeptides or related proteins is a fern or other primitive plant species that contains an IPD079 polynucleotide of SEQ ID NO: 1, SEQ ID NO: 3, SEQ ID NO: 5, SEQ ID NO: 7, SEQ ID NO: 9, SEQ ID NO: 11, SEQ ID NO: 13, SEQ ID NO: 15, SEQ ID NO: 17, SEQ ID NO: 19, SEQ ID NO: 21, SEQ ID NO: 23, SEQ ID NO: 25, SEQ ID NO: 27, SEQ ID NO: 29, SEQ ID NO: 31, SEQ ID NO: 33, SEQ ID NO: 35, SEQ ID NO: 37, SEQ ID NO: 39, SEQ ID NO: 41, SEQ ID NO: 43, SEQ ID NO: 45, SEQ ID NO: 47, SEQ ID NO: 49, SEQ ID NO: 51, SEQ ID NO: 53, SEQ ID NO: 71, SEQ ID NO: 73, SEQ ID NO: 75, SEQ ID NO: 77, SEQ ID NO: 79, SEQ ID NO: 81, SEQ ID NO: 83, SEQ ID NO: 85, SEQ ID NO: 87, SEQ ID NO: 89, SEQ ID NO: 91, SEQ ID NO: 93, SEQ ID NO: 57, SEQ ID NO: 55, SEQ ID NO: 59, SEQ ID NO: 61, SEQ ID NO: 63, SEQ ID NO: 65, SEQ ID NO: 67, SEQ ID NO: 69, SEQ ID NO: 95, SEQ ID NO: 97, SEQ ID NO: 99, SEQ ID NO: 101, SEQ ID NO: 103, SEQ ID NO: 105, SEQ ID NO: 107, SEQ ID NO: 109, SEQ ID NO: 111, SEQ ID NO: 113, SEQ ID NO: 115, SEQ ID NO: 117, SEQ ID NO: 119, SEQ ID NO: 121, SEQ ID NO: 123, SEQ ID NO: 125, SEQ ID NO: 127, SEQ ID NO: 129, SEQ ID NO: 131, SEQ ID NO: 133, SEQ ID NO: 135, SEQ ID NO: 137 or SEQ ID NO: 139 encoding an IPD079 polypeptide of SEQ ID NO: 2, SEQ ID NO: 4, SEQ ID NO: 6, SEQ ID NO: 8, SEQ ID NO: 10, SEQ ID NO: 12, SEQ ID NO: 14, SEQ ID NO: 16, SEQ ID NO: 18, SEQ ID NO: 20, SEQ ID NO: 22, SEQ ID NO: 24, SEQ ID NO: 26, SEQ ID NO: 28, SEQ ID NO: 30, SEQ ID NO: 32, SEQ ID NO: 34, SEQ ID NO: 36, SEQ ID NO: 38, SEQ ID NO: 40, SEQ ID NO: 42, SEQ ID NO: 44, SEQ ID NO: 46, SEQ ID NO: 48, SEQ ID NO: 50, SEQ ID NO: 52, SEQ ID NO: 54, SEQ ID NO: 72, SEQ ID NO: 74, SEQ ID NO: 76, SEQ ID NO: 78, SEQ ID NO: 80, SEQ ID NO: 82, SEQ ID NO: 84, SEQ ID NO: 86, SEQ ID NO: 88, SEQ ID NO: 90, SEQ ID NO: 92, SEQ ID NO: 94, SEQ ID NO: 56, SEQ ID NO: 58, SEQ ID NO: 60, SEQ ID NO: 62, SEQ ID NO: 64, SEQ ID NO: 66, SEQ ID NO: 68, SEQ ID NO: 70, SEQ ID NO: 96, SEQ ID NO: 98, SEQ ID NO: 100, SEQ ID NO: 102, SEQ ID NO: 104, SEQ ID NO: 106, SEQ ID NO: 108, SEQ ID NO: 110, SEQ ID NO: 112, SEQ ID NO: 114, SEQ ID NO: 116, SEQ ID NO: 118, SEQ ID NO: 120, SEQ ID NO: 122, SEQ ID NO: 124, SEQ ID NO: 126, SEQ ID NO: 128, SEQ ID NO: 130, SEQ ID NO: 132, SEQ ID NO: 134, SEQ ID NO: 136, SEQ ID NO: 138 or SEQ ID NO: 140. The polynucleotides of SEQ ID NO: 1, SEQ ID NO: 3, SEQ ID NO: 5, SEQ ID NO: 7, SEQ ID NO: 9, SEQ ID NO: 11, SEQ ID NO: 13, SEQ ID NO: 15, SEQ ID NO: 17, SEQ ID NO: 19, SEQ ID NO: 21, SEQ ID NO: 23, SEQ ID NO: 25, SEQ ID NO: 27, SEQ ID NO: 29, SEQ ID NO: 31, SEQ ID NO: 33, SEQ ID NO: 35, SEQ ID NO: 37, SEQ ID NO: 39, SEQ ID NO: 41, SEQ ID NO: 43, SEQ ID NO: 45, SEQ ID NO: 47, SEQ ID NO: 49, SEQ ID NO: 51, SEQ ID NO: 53, SEQ ID NO: 71, SEQ ID NO: 73, SEQ ID NO: 75, SEQ ID NO: 77, SEQ ID NO: 79, SEQ ID NO: 81, SEQ ID NO: 83, SEQ ID NO: 85, SEQ ID NO: 87, SEQ ID NO: 89, SEQ ID NO: 91, SEQ ID NO: 93, SEQ ID NO: 57, SEQ ID NO: 55, SEQ ID NO: 59, SEQ ID NO: 61, SEQ ID NO: 63, SEQ ID NO: 65, SEQ ID NO: 67, SEQ ID NO: 69, SEQ ID NO: 95, SEQ ID NO: 97, SEQ ID NO: 99, SEQ ID NO: 101, SEQ ID NO: 103, SEQ ID NO: 105, SEQ ID NO: 107, SEQ ID NO: 109, SEQ ID NO: 111, SEQ ID NO: 113, SEQ ID NO: 115, SEQ ID NO: 117, SEQ ID NO: 119, SEQ ID NO: 121, SEQ ID NO: 123, SEQ ID NO: 125, SEQ ID NO: 127, SEQ ID NO: 129, SEQ ID NO: 131, SEQ ID NO: 133, SEQ ID NO: 135, SEQ ID NO: 137 or SEQ ID NO: 139 can be used to express IPD079 polypeptides in bacterial hosts that include but are not limited to Agrobacterium, Bacillus, Escherichia, Salmonella, Pseudomonas and Rhizobium bacterial host cells. The polynucleotides are also useful as probes for isolating homologous or substantially homologous polynucleotides that encode IPD079 polypeptides or related proteins. Such probes can be used to identify homologous or substantially homologous polynucleotides derived from Pteridophyta species.

[0029] Polynucleotides that encode plant derived perforins and IPD079 polypeptides of the disclosure can also be synthesized de novo from the plant derived perforins or IPD079 polypeptide sequence. The sequence of the polynucleotide gene can be deduced from an IPD079 polypeptide sequence, through use of the genetic code. Computer programs such as “BackTranslate” (GCG™ Package, Acclerys, Inc. San Diego, Calif.) can be used to convert a peptide sequence to the corresponding nucleotide sequence encoding the peptide. Examples of plant derived perforin sequences that can be used to obtain corresponding nucleotide encoding sequences include, but are not limited to the polypeptides of any one of SEQ ID NOs: 158-1248. Examples of IPD079 polypeptide sequences that can be used to obtain corresponding nucleotide encoding sequences include, but are not limited to the IPD079 polypeptides of SEQ ID NO: 2, SEQ ID NO: 4, SEQ ID NO: 6, SEQ ID NO: 8, SEQ ID NO: 10, SEQ ID NO: 12, SEQ ID NO: 14, SEQ ID NO: 16, SEQ ID NO: 18, SEQ ID NO: 20, SEQ ID NO: 22, SEQ ID NO: 24, SEQ ID NO: 26, SEQ ID NO: 28, SEQ ID NO: 30, SEQ ID NO: 32, SEQ ID NO: 34, SEQ ID NO: 36, SEQ ID NO: 38, SEQ ID NO: 40, SEQ ID NO: 42, SEQ ID NO: 44, SEQ ID NO: 46, SEQ ID NO: 48, SEQ ID NO: 50, SEQ ID NO: 52, SEQ ID NO: 54, SEQ ID NO: 72, SEQ ID NO: 74, SEQ ID NO: 76, SEQ ID NO: 78, SEQ ID NO: 80, SEQ ID NO: 82, SEQ ID NO: 84, SEQ ID NO: 86, SEQ ID NO: 88, SEQ ID NO: 90, SEQ ID NO: 92, SEQ ID NO: 94, SEQ ID NO: 56, SEQ ID NO: 58, SEQ ID NO: 60, SEQ ID NO: 62, SEQ ID NO: 64, SEQ ID NO: 66, SEQ ID NO: 68, SEQ ID NO: 70, SEQ ID NO: 96, SEQ ID NO: 98, SEQ ID NO: 100, SEQ ID NO: 102, SEQ ID NO: 104, SEQ ID NO: 106, SEQ ID NO: 108, SEQ ID NO: 110, SEQ ID NO: 112, SEQ ID NO: 114, SEQ ID NO: 116, SEQ ID NO: 118, SEQ ID NO: 120, SEQ ID NO: 122, SEQ ID NO: 124, SEQ ID NO: 126, SEQ ID NO: 128, SEQ ID NO: 130, SEQ ID NO: 132, SEQ ID NO: 134, SEQ ID NO: 136, SEQ ID NO: 138, and SEQ ID NO: 140. Furthermore, synthetic polynucleotide sequences encoding plant derived perforins and IPD079 polypeptides of the disclosure can be designed so that they will be expressed in plants using methods known in the art.

[0030] In some embodiments the nucleic acid molecule encoding an IPD079 polypeptide is a polynucleotide having the sequence set forth in SEQ ID NO: 1, SEQ ID NO: 3, SEQ ID NO: 5, SEQ ID NO: 7, SEQ ID NO: 9, SEQ ID NO: 11, SEQ ID NO: 13, SEQ ID NO: 15, SEQ ID NO: 17, SEQ ID NO: 19, SEQ ID NO: 21, SEQ ID NO: 23, SEQ ID NO: 25, SEQ ID NO: 27, SEQ ID NO: 29, SEQ ID NO: 31, SEQ ID NO: 33, SEQ ID NO: 35, SEQ ID NO: 37, SEQ ID NO: 39, SEQ ID NO: 41, SEQ ID NO: 43, SEQ ID NO: 45, SEQ ID NO: 47, SEQ ID NO: 49, SEQ ID NO: 51, SEQ ID NO: 53, SEQ ID NO: 71, SEQ ID NO: 73, SEQ ID NO: 75, SEQ ID NO: 77, SEQ ID NO: 79, SEQ ID NO: 81, SEQ ID NO: 83, SEQ ID NO: 85, SEQ ID NO: 87, SEQ ID NO: 89, SEQ ID NO: 91, SEQ ID NO: 93, SEQ ID NO: 57, SEQ ID NO: 55, SEQ ID NO: 59, SEQ ID NO: 61, SEQ ID NO: 63, SEQ ID NO: 65, SEQ ID NO: 67, SEQ ID NO: 69, SEQ ID NO: 95, SEQ ID NO: 97, SEQ ID NO: 99, SEQ ID NO: 101, SEQ ID NO: 103, SEQ ID NO: 105, SEQ ID NO: 107, SEQ ID NO: 109, SEQ ID NO: 111, SEQ ID NO: 113, SEQ ID NO: 115, SEQ ID NO: 117, SEQ ID NO: 119, SEQ ID NO: 121, SEQ ID NO: 123, SEQ ID NO: 125, SEQ ID NO: 127, SEQ ID NO: 129, SEQ ID NO: 131, SEQ ID NO: 133, SEQ ID NO: 135, SEQ ID NO: 137 or SEQ ID NO: 139, and variants, fragments and complements thereof. “Complement” is used herein to refer to a nucleic acid sequence that is sufficiently complementary to a given nucleic acid sequence such that it can hybridize to the given nucleic acid sequence to thereby form a stable duplex. “Polynucleotide sequence variants” is used herein to refer to a nucleic acid sequence that except for the degeneracy of the genetic code encodes the same polypeptide.

[0031] In some embodiments the nucleic acid molecule encoding the plant derived perforin or IPD079 polypeptide is a non-genomic nucleic acid sequence. As used herein a “non-genomic nucleic acid sequence” or “non-genomic nucleic acid molecule” or “non-genomic polynucleotide” refers to a nucleic acid molecule that has one or more change in the nucleic acid sequence compared to a native or genomic nucleic acid sequence. In some embodiments the change to a native or genomic nucleic acid molecule includes but is not limited to: changes in the nucleic acid sequence due to the degeneracy of the genetic code; codon optimization of the nucleic acid sequence for expression in plants; changes in the nucleic acid sequence to introduce at least one amino acid substitution, insertion, deletion and/or addition compared to the native or genomic sequence; removal of one or more intron associated with the genomic nucleic acid sequence; insertion of one or more heterologous introns; deletion of one or more upstream or downstream regulatory regions associated with the genomic nucleic acid sequence; insertion of one or more heterologous upstream or downstream regulatory regions; deletion of the 5′ and/or 3′ untranslated region associated with the genomic nucleic acid sequence; insertion of a heterologous 5′ and/or 3′ untranslated region; and modification of a polyadenylation site. In some embodiments the non-genomic nucleic acid molecule is a cDNA. In some embodiments the non-genomic nucleic acid molecule is a synthetic nucleic acid sequence.

[0032] In some embodiments the nucleic acid molecule encoding an IPD079 polypeptide is a non-genomic polynucleotide having a nucleotide sequence having at least 50%, 51%, 52%, 53%, 54%, 55%, 56%, 57%, 58%, 59%, 60%, 61%, 62%, 63%, 64%, 65%, 66%, 67%, 68%, 69%, 70%, 71%, 72%, 73%, 74%, 75%, 76%, 77%, 78%, 79%, 80%, 81%, 82%, 83%, 84%, 85%, 86%, 87%, 88%, 89%, 90%, 91%, 92%, 93%, 94%, 95%, 96%, 97%, 98% or 99% identity, to the nucleic acid sequence of SEQ ID NO: 1, SEQ ID NO: 3, SEQ ID NO: 5, SEQ ID NO: 7, SEQ ID NO: 9, SEQ ID NO: 11, SEQ ID NO: 13, SEQ ID NO: 15, SEQ ID NO: 17, SEQ ID NO: 19, SEQ ID NO: 21, SEQ ID NO: 23, SEQ ID NO: 25, SEQ ID NO: 27, SEQ ID NO: 29, SEQ ID NO: 31, SEQ ID NO: 33, SEQ ID NO: 35, SEQ ID NO: 37, SEQ ID NO: 39, SEQ ID NO: 41, SEQ ID NO: 43, SEQ ID NO: 45, SEQ ID NO: 47, SEQ ID NO: 49, SEQ ID NO: 51, SEQ ID NO: 53, SEQ ID NO: 71, SEQ ID NO: 73, SEQ ID NO: 75, SEQ ID NO: 77, SEQ ID NO: 79, SEQ ID NO: 81, SEQ ID NO: 83, SEQ ID NO: 85, SEQ ID NO: 87, SEQ ID NO: 89, SEQ ID NO: 91, SEQ ID NO: 93, SEQ ID NO: 57, SEQ ID NO: 55, SEQ ID NO: 59, SEQ ID NO: 61, SEQ ID NO: 63, SEQ ID NO: 65, SEQ ID NO: 67, SEQ ID NO: 69, SEQ ID NO: 95, SEQ ID NO: 97, SEQ ID NO: 99, SEQ ID NO: 101, SEQ ID NO: 103, SEQ ID NO: 105, SEQ ID NO: 107, SEQ ID NO: 109, SEQ ID NO: 111, SEQ ID NO: 113, SEQ ID NO: 115, SEQ ID NO: 117, SEQ ID NO: 119, SEQ ID NO: 121, SEQ ID NO: 123, SEQ ID NO: 125, SEQ ID NO: 127, SEQ ID NO: 129, SEQ ID NO: 131, SEQ ID NO: 133, SEQ ID NO: 135, SEQ ID NO: 137 or SEQ ID NO: 139, wherein the IPD079 polypeptide has insecticidal activity.

[0033] In some embodiments the nucleic acid molecule encodes an IPD079 polypeptide comprising an amino acid sequence of SEQ ID NO: 2, SEQ ID NO: 4, SEQ ID NO: 6, SEQ ID NO: 8, SEQ ID NO: 10, SEQ ID NO: 12, SEQ ID NO: 14, SEQ ID NO: 16, SEQ ID NO: 18, SEQ ID NO: 20, SEQ ID NO: 22, SEQ ID NO: 24, SEQ ID NO: 26, SEQ ID NO: 28, SEQ ID NO: 30, SEQ ID NO: 32, SEQ ID NO: 34, SEQ ID NO: 36, SEQ ID NO: 38, SEQ ID NO: 40, SEQ ID NO: 42, SEQ ID NO: 44, SEQ ID NO: 46, SEQ ID NO: 48, SEQ ID NO: 50, SEQ ID NO: 52, SEQ ID NO: 54, SEQ ID NO: 72, SEQ ID NO: 74, SEQ ID NO: 76, SEQ ID NO: 78, SEQ ID NO: 80, SEQ ID NO: 82, SEQ ID NO: 84, SEQ ID NO: 86, SEQ ID NO: 88, SEQ ID NO: 90, SEQ ID NO: 92, SEQ ID NO: 94, SEQ ID NO: 56, SEQ ID NO: 58, SEQ ID NO: 60, SEQ ID NO: 62, SEQ ID NO: 64, SEQ ID NO: 66, SEQ ID NO: 68, SEQ ID NO: 70, SEQ ID NO: 96, SEQ ID NO: 98, SEQ ID NO: 100, SEQ ID NO: 102, SEQ ID NO: 104, SEQ ID NO: 106, SEQ ID NO: 108, SEQ ID NO: 110, SEQ ID NO: 112, SEQ ID NO: 114, SEQ ID NO: 116, SEQ ID NO: 118, SEQ ID NO: 120, SEQ ID NO: 122, SEQ ID NO: 124, SEQ ID NO: 126, SEQ ID NO: 128, SEQ ID NO: 130, SEQ ID NO: 132, SEQ ID NO: 134, SEQ ID NO: 136, SEQ ID NO: 138 or SEQ ID NO: 140, having 1, 2, 3, 4, 5, 6, 7, 8, 9, 10 11, 12, 13, 14, 15, 16, 17, 18, 19, 20, 21, 22, 23, 24, 25, 26, 27, 28, 29, 30, 31, 32, 33, 34, 35, 36, 37, 38, 39, 40, 41, 42, 43, 44, 45, 46, 47, 48, 49, 50, 51, 52, 53, 54, 55, 56, 57, 58, 59, 60, 61, 62, 63, 64, 65, 66, 67, 68, 69, 70 or more amino acid substitutions compared to the native amino acid at the corresponding position of SEQ ID NO: 2, SEQ ID NO: 4, SEQ ID NO: 6, SEQ ID NO: 8, SEQ ID NO: 10, SEQ ID NO: 12, SEQ ID NO: 14, SEQ ID NO: 16, SEQ ID NO: 18, SEQ ID NO: 20, SEQ ID NO: 22, SEQ ID NO: 24, SEQ ID NO: 26, SEQ ID NO: 28, SEQ ID NO: 30, SEQ ID NO: 32, SEQ ID NO: 34, SEQ ID NO: 36, SEQ ID NO: 38, SEQ ID NO: 40, SEQ ID NO: 42, SEQ ID NO: 44, SEQ ID NO: 46, SEQ ID NO: 48, SEQ ID NO: 50, SEQ ID NO: 52, SEQ ID NO: 54, SEQ ID NO: 72, SEQ ID NO: 74, SEQ ID NO: 76, SEQ ID NO: 78, SEQ ID NO: 80, SEQ ID NO: 82, SEQ ID NO: 84, SEQ ID NO: 86, SEQ ID NO: 88, SEQ ID NO: 90, SEQ ID NO: 92, SEQ ID NO: 94, SEQ ID NO: 56, SEQ ID NO: 58, SEQ ID NO: 60, SEQ ID NO: 62, SEQ ID NO: 64, SEQ ID NO: 66, SEQ ID NO: 68, SEQ ID NO: 70, SEQ ID NO: 96, SEQ ID NO: 98, SEQ ID NO: 100, SEQ ID NO: 102, SEQ ID NO: 104, SEQ ID NO: 106, SEQ ID NO: 108, SEQ ID NO: 110, SEQ ID NO: 112, SEQ ID NO: 114, SEQ ID NO: 116, SEQ ID NO: 118, SEQ ID NO: 120, SEQ ID NO: 122, SEQ ID NO: 124, SEQ ID NO: 126, SEQ ID NO: 128, SEQ ID NO: 130, SEQ ID NO: 132, SEQ ID NO: 134, SEQ ID NO: 136, SEQ ID NO: 138 or SEQ ID NO: 140.

[0034] In some embodiments the nucleic acid molecule encodes the plant derived perforin polypeptide of any one of SEQ ID NOs: 158-1248.

[0035] In some embodiments the nucleic acid molecule encoding the plant derived perforin or IPD079 polypeptide is derived from a fern species in the Division Pteridophyta. The phylogeny of ferns as used herein is based on the classification for extant ferns by A. R. Smith et al, TAXON, 55:705-731 (2006). Other phylogenic classifications of extant ferns are known to one skilled in the art. Additional information on the phylogeny of ferns can be found at mobot.org/MOBOT/research/APweb/ (which can be accessed using the “www” prefix) and Schuettpelz E. and Pryer K. M., TAXON 56: 1037-1050 (2007) based on three plastid genes. Additional fern and other primitive plant species can be found at homepages.caverock.net.nz/˜bj/fern/list.htm (which can be accessed using the http:// prefix).

[0036] Also provided are nucleic acid molecules that encode transcription and/or translation products that are subsequently spliced to ultimately produce functional plant derived perforins or IPD079 polypeptides. Splicing can be accomplished in vitro or in vivo, and can involve cis- or trans-splicing. The substrate for splicing can be polynucleotides (e.g., RNA transcripts) or polypeptides. An example of cis-splicing of a polynucleotide is where an intron inserted into a coding sequence is removed and the two flanking exon regions are spliced to generate an IPD079 polypeptide encoding sequence. An example of trans splicing would be where a polynucleotide is encrypted by separating the coding sequence into two or more fragments that can be separately transcribed and then spliced to form the full-length pesticidal encoding sequence. The use of a splicing enhancer sequence, which can be introduced into a construct, can facilitate splicing either in cis or trans-splicing of polypeptides (U.S. Pat. Nos. 6,365,377 and 6,531,316). Thus, in some embodiments the polynucleotides do not directly encode a full-length IPD079 polypeptide, but rather encode a fragment or fragments of an IPD079 polypeptide. These polynucleotides can be used to express a functional IPD079 polypeptide through a mechanism involving splicing, where splicing can occur at the level of polynucleotide (e.g., intron/exon) and/or polypeptide (e.g., intein/extein). This can be useful, for example, in controlling expression of pesticidal activity, since a functional pesticidal polypeptide will only be expressed if all required fragments are expressed in an environment that permits splicing processes to generate functional product. In another example, introduction of one or more insertion sequences into a polynucleotide can facilitate recombination with a low homology polynucleotide; use of an intron or intein for the insertion sequence facilitates the removal of the intervening sequence, thereby restoring function of the encoded variant.

[0037] Nucleic acid molecules that are fragments of these nucleic acid sequences encoding IPD079 polypeptides are also encompassed by the embodiments. “Fragment” as used herein refers to a portion of the nucleic acid sequence encoding an IPD079 polypeptide. A fragment of a nucleic acid sequence may encode a biologically active portion of an IPD079 polypeptide or it may be a fragment that can be used as a hybridization probe or PCR primer using methods disclosed below. Nucleic acid molecules that are fragments of a nucleic acid sequence encoding an IPD079 polypeptide comprise at least about 180, 210, 240, 270, 300, 330, 360, 390 or 420 contiguous nucleotides or up to the number of nucleotides present in a full-length nucleic acid sequence encoding an IPD079 polypeptide disclosed herein, depending upon the intended use. “Contiguous nucleotides” is used herein to refer to nucleotide residues that are immediately adjacent to one another. Fragments of the nucleic acid sequences of the embodiments will encode protein fragments that retain the biological activity of the IPD079 polypeptide and, hence, retain insecticidal activity. “Retains insecticidal activity” is used herein to refer to a polypeptide having at least about 10%, at least about 30%, at least about 50%, at least about 70%, 80%, 90%, 95% or higher of the insecticidal activity of the full-length polypeptide. In some embodiments the IPD079 polypeptide has at least about 10%, at least about 30%, at least about 50%, at least about 70%, 80%, 90%, 95% or higher of the insecticidal activity of the full-length IPD079Aa polypeptide (SEQ ID NO: 2). In one embodiment, the insecticidal activity is against a Coleopteran species. In one embodiment, the insecticidal activity is against a Diabrotica species. In some embodiments, the insecticidal activity is against one or more insect pests of the corn rootworm complex: western corn rootworm, Diabrotica virgifera; northern corn rootworm, D. barberi: Southern corn rootworm or spotted cucumber beetle; Diabrotica undecimpunctata howardi; and the Mexican corn rootworm, D. virgifera zeae.

[0038] In some embodiments a fragment of a nucleic acid sequence encoding an IPD079 polypeptide encoding a biologically active portion of a protein will encode at least about 15, 20, 30, 50, 75, 100, 125, contiguous amino acids or up to the total number of amino acids present in the full-length IPD079 polypeptide of the disclosure. In some embodiments, the fragment is an N-terminal and/or a C-terminal truncation of at least about 1, 2, 3, 4, 5, 6, 7, 8, 9, 10, 11, 12, 13, 14, 15, 16, 17, 18, 19, 20, 21, 22, 23, 24, 25, 26, 27, 28, 29, 30, 31, 32, 33, 34 or more amino acids from the N-terminus and/or C-terminus relative an IPD079 polypeptide disclosed herein, or variants thereof, e.g., by proteolysis, insertion of a start codon, deletion of the codons encoding the deleted amino acids with the concomitant insertion of a stop codon or by insertion of a stop codon in the coding sequence.

[0039] In some embodiments the IPD079 polypeptide is encoded by a nucleic acid sequence sufficiently homologous to the nucleic acid sequence of SEQ ID NO: 1, SEQ ID NO: 3, SEQ ID NO: 5, SEQ ID NO: 7, SEQ ID NO: 9, SEQ ID NO: 11, SEQ ID NO: 13, SEQ ID NO: 15, SEQ ID NO: 17, SEQ ID NO: 19, SEQ ID NO: 21, SEQ ID NO: 23, SEQ ID NO: 25, SEQ ID NO: 27, SEQ ID NO: 29, SEQ ID NO: 31, SEQ ID NO: 33, SEQ ID NO: 35, SEQ ID NO: 37, SEQ ID NO: 39, SEQ ID NO: 41, SEQ ID NO: 43, SEQ ID NO: 45, SEQ ID NO: 47, SEQ ID NO: 49, SEQ ID NO: 51, SEQ ID NO: 53, SEQ ID NO: 71, SEQ ID NO: 73, SEQ ID NO: 75, SEQ ID NO: 77, SEQ ID NO: 79, SEQ ID NO: 81, SEQ ID NO: 83, SEQ ID NO: 85, SEQ ID NO: 87, SEQ ID NO: 89, SEQ ID NO: 91, SEQ ID NO: 93, SEQ ID NO: 57, SEQ ID NO: 55, SEQ ID NO: 59, SEQ ID NO: 61, SEQ ID NO: 63, SEQ ID NO: 65, SEQ ID NO: 67, SEQ ID NO: 69, SEQ ID NO: 95, SEQ ID NO: 97, SEQ ID NO: 99, SEQ ID NO: 101, SEQ ID NO: 103, SEQ ID NO: 105, SEQ ID NO: 107, SEQ ID NO: 109, SEQ ID NO: 111, SEQ ID NO: 113, SEQ ID NO: 115, SEQ ID NO: 117, SEQ ID NO: 119, SEQ ID NO: 121, SEQ ID NO: 123, SEQ ID NO: 125, SEQ ID NO: 127, SEQ ID NO: 129, SEQ ID NO: 131, SEQ ID NO: 133, SEQ ID NO: 135, SEQ ID NO: 137 or SEQ ID NO: 139. “Sufficiently homologous” is used herein to refer to an amino acid or nucleic acid sequence that has at least about 50%, 55%, 60%, 65%, 70%, 75%, 80%, 81%, 82%, 83%, 84%, 85%, 86%, 87%, 88%, 89%, 90%, 91%, 92%, 93%, 94%, 95%, 96%, 97%, 98%, 99% or greater sequence homology compared to a reference sequence using one of the alignment programs described herein using standard parameters. One of skill in the art will recognize that these values can be appropriately adjusted to determine corresponding homology of proteins encoded by two nucleic acid sequences by taking into account codon degeneracy, amino acid similarity, reading frame positioning, and the like. In some embodiments the sequence homology is against the full length sequence of the polynucleotide encoding an IPD079 polypeptide or against the full length sequence of an IPD079 polypeptide.

[0040] In some embodiments the nucleic acid encoding an IPD079 polypeptide is selected from SEQ ID NO: 1, SEQ ID NO: 3, SEQ ID NO: 5, SEQ ID NO: 7, SEQ ID NO: 9, SEQ ID NO: 11, SEQ ID NO: 13, SEQ ID NO: 15, SEQ ID NO: 17, SEQ ID NO: 19, SEQ ID NO: 21, SEQ ID NO: 23, SEQ ID NO: 25, SEQ ID NO: 27, SEQ ID NO: 29, SEQ ID NO: 31, SEQ ID NO: 33, SEQ ID NO: 35, SEQ ID NO: 37, SEQ ID NO: 39, SEQ ID NO: 41, SEQ ID NO: 43, SEQ ID NO: 45, SEQ ID NO: 47, SEQ ID NO: 49, SEQ ID NO: 51, SEQ ID NO: 53, SEQ ID NO: 71, SEQ ID NO: 73, SEQ ID NO: 75, SEQ ID NO: 77, SEQ ID NO: 79, SEQ ID NO: 81, SEQ ID NO: 83, SEQ ID NO: 85, SEQ ID NO: 87, SEQ ID NO: 89, SEQ ID NO: 91, SEQ ID NO: 93, SEQ ID NO: 57, SEQ ID NO: 55, SEQ ID NO: 59, SEQ ID NO: 61, SEQ ID NO: 63, SEQ ID NO: 65, SEQ ID NO: 67, SEQ ID NO: 69, SEQ ID NO: 95, SEQ ID NO: 97, SEQ ID NO: 99, SEQ ID NO: 101, SEQ ID NO: 103, SEQ ID NO: 105, SEQ ID NO: 107, SEQ ID NO: 109, SEQ ID NO: 111, SEQ ID NO: 113, SEQ ID NO: 115, SEQ ID NO: 117, SEQ ID NO: 119, SEQ ID NO: 121, SEQ ID NO: 123, SEQ ID NO: 125, SEQ ID NO: 127, SEQ ID NO: 129, SEQ ID NO: 131, SEQ ID NO: 133, SEQ ID NO: 135, SEQ ID NO: 137 or SEQ ID NO: 139.

[0041] In some embodiments the nucleic acid encodes an IPD079 polypeptide having at least about 50%, 55%, 60%, 65%, 70%, 75%, 80%, 81%, 82%, 83%, 84%, 85%, 86%, 87%, 88%, 89%, 90%, 91%, 92%, 93%, 94%, 95%, 96%, 97%, 98%, 99% or greater sequence identity compared to SEQ ID NO: 2, SEQ ID NO: 4, SEQ ID NO: 6, SEQ ID NO: 8, SEQ ID NO: 10, SEQ ID NO: 12, SEQ ID NO: 14, SEQ ID NO: 16, SEQ ID NO: 18, SEQ ID NO: 20, SEQ ID NO: 22, SEQ ID NO: 24, SEQ ID NO: 26, SEQ ID NO: 28, SEQ ID NO: 30, SEQ ID NO: 32, SEQ ID NO: 34, SEQ ID NO: 36, SEQ ID NO: 38, SEQ ID NO: 40, SEQ ID NO: 42, SEQ ID NO: 44, SEQ ID NO: 46, SEQ ID NO: 48, SEQ ID NO: 50, SEQ ID NO: 52, SEQ ID NO: 54, SEQ ID NO: 72, SEQ ID NO: 74, SEQ ID NO: 76, SEQ ID NO: 78, SEQ ID NO: 80, SEQ ID NO: 82, SEQ ID NO: 84, SEQ ID NO: 86, SEQ ID NO: 88, SEQ ID NO: 90, SEQ ID NO: 92, SEQ ID NO: 94, SEQ ID NO: 56, SEQ ID NO: 58, SEQ ID NO: 60, SEQ ID NO: 62, SEQ ID NO: 64, SEQ ID NO: 66, SEQ ID NO: 68, SEQ ID NO: 70, SEQ ID NO: 96, SEQ ID NO: 98, SEQ ID NO: 100, SEQ ID NO: 102, SEQ ID NO: 104, SEQ ID NO: 106, SEQ ID NO: 108, SEQ ID NO: 110, SEQ ID NO: 112, SEQ ID NO: 114, SEQ ID NO: 116, SEQ ID NO: 118, SEQ ID NO: 120, SEQ ID NO: 122, SEQ ID NO: 124, SEQ ID NO: 126, SEQ ID NO: 128, SEQ ID NO: 130, SEQ ID NO: 132, SEQ ID NO: 134, SEQ ID NO: 136, SEQ ID NO: 138 or SEQ ID NO: 140.

[0042] To determine the percent identity of two amino acid sequences or of two nucleic acid sequences, a mathematical algorithm is utilized for the comparison of sequences. The mathematical algorithm is the algorithm of Needleman and Wunsch, (1970) J Mol. Biol. 48(3):443-453, used GAP Version 10 software to determine sequence identity or similarity using the following default parameters: % identity and % similarity for a nucleic acid sequence using GAP Weight of 50 and Length Weight of 3, and the nwsgapdna.cmpii scoring matrix; % identity or % similarity for an amino acid sequence using GAP weight of 8 and length weight of 2, and the BLOSUM62 scoring program. Equivalent programs may also be used. “Equivalent program” is used herein to refer to any sequence comparison program that, for any two sequences in question, generates an alignment having identical nucleotide residue matches and an identical percent sequence identity when compared to the corresponding alignment generated by GAP Version 10.

[0043] The embodiments also encompass nucleic acid molecules encoding IPD079 polypeptide variants. “Variants” of the IPD079 polypeptide encoding nucleic acid sequences include those sequences that encode the IPD079 polypeptides disclosed herein but that differ conservatively because of the degeneracy of the genetic code as well as those that are sufficiently identical as discussed above. Naturally occurring allelic variants can be identified with the use of well-known molecular biology techniques, such as polymerase chain reaction (PCR) and hybridization techniques as outlined below. Variant nucleic acid sequences also include synthetically derived nucleic acid sequences that have been generated, for example, by using site-directed mutagenesis but which still encode the IPD079 polypeptides disclosed as discussed below.

[0044] The present disclosure provides isolated or recombinant polynucleotides that encode any of the IPD079 polypeptides disclosed herein. Those having ordinary skill in the art will readily appreciate that due to the degeneracy of the genetic code, a multitude of nucleotide sequences encoding IPD079 polypeptides of the present disclosure exist.

[0045] The skilled artisan will further appreciate that changes can be introduced by mutation of the nucleic acid sequences thereby leading to changes in the amino acid sequence of the encoded IPD079 polypeptides, without altering the biological activity of the proteins. Thus, variant nucleic acid molecules can be created by introducing one or more nucleotide substitutions, additions and/or deletions into the corresponding nucleic acid sequence disclosed herein, such that one or more amino acid substitutions, additions or deletions are introduced into the encoded protein. Mutations can be introduced by standard techniques, such as site-directed mutagenesis and PCR-mediated mutagenesis. Such variant nucleic acid sequences are also encompassed by the present disclosure.

[0046] Alternatively, variant nucleic acid sequences can be made by introducing mutations randomly along all or part of the coding sequence, such as by saturation mutagenesis, and the resultant mutants can be screened for ability to confer pesticidal activity to identify mutants that retain activity. Following mutagenesis, the encoded protein can be expressed recombinantly, and the activity of the protein can be determined using standard assay techniques.

[0047] The polynucleotides of the disclosure and fragments thereof are optionally used as substrates for a variety of recombination and recursive recombination reactions, in addition to standard cloning methods as set forth in, e.g., Ausubel, Berger and Sambrook, i.e., to produce additional pesticidal polypeptide homologues and fragments thereof with desired properties. A variety of such reactions are known, including those developed by the inventors and their co-workers. Methods for producing a variant of any nucleic acid listed herein comprising recursively recombining such polynucleotide with a second (or more) polynucleotide, thus forming a library of variant polynucleotides are also embodiments of the disclosure, as are the libraries produced, the cells comprising the libraries and any recombinant polynucleotide produces by such methods. Additionally, such methods optionally comprise selecting a variant polynucleotide from such libraries based on pesticidal activity, as is wherein such recursive recombination is done in vitro or in vivo.

[0048] A variety of diversity generating protocols, including nucleic acid recursive recombination protocols are available and fully described in the art. The procedures can be used separately, and/or in combination to produce one or more variants of a nucleic acid or set of nucleic acids, as well as variants of encoded proteins. Individually and collectively, these procedures provide robust, widely applicable ways of generating diversified nucleic acids and sets of nucleic acids (including, e.g., nucleic acid libraries) useful, e.g., for the engineering or rapid evolution of nucleic acids, proteins, pathways, cells and/or organisms with new and/or improved characteristics.

[0049] While distinctions and classifications are made in the course of the ensuing discussion for clarity, it will be appreciated that the techniques are often not mutually exclusive. Indeed, the various methods can be used singly or in combination, in parallel or in series, to access diverse sequence variants.

[0050] The result of any of the diversity generating procedures described herein can be the generation of one or more nucleic acids, which can be selected or screened for nucleic acids with or which confer desirable properties or that encode proteins with or which confer desirable properties. Following diversification by one or more of the methods herein or otherwise available to one of skill, any nucleic acids that are produced can be selected for a desired activity or property, e.g. pesticidal activity or, such activity at a desired pH, etc. This can include identifying any activity that can be detected, for example, in an automated or automatable format, by any of the assays in the art, see, e.g., discussion of screening of insecticidal activity, infra. A variety of related (or even unrelated) properties can be evaluated, in serial or in parallel, at the discretion of the practitioner.

[0051] Descriptions of a variety of diversity generating procedures for generating modified nucleic acid sequences, e.g., those coding for polypeptides having pesticidal activity or fragments thereof, are found in the following publications and the references cited therein: Soong, et al., (2000) Nat Genet 25(4):436-439; Stemmer, et al., (1999) Tumor Targeting 4:1-4; Ness, et al., (1999) Nat Biotechnol 17:893-896; Chang, et al., (1999) Nat Biotechnol 17:793-797; Minshull and Stemmer, (1999) Curr Opin Chem Biol 3:284-290; Christians, et al., (1999) Nat Biotechnol 17:259-264; Crameri, et al., (1998) Nature 391:288-291; Crameri, et al., (1997) Nat Biotechnol 15:436-438; Zhang, et al., (1997) PNAS USA 94:4504-4509; Patten, et al., (1997) Curr Opin Biotechnol 8:724-733; Crameri, et al., (1996) Nat Med 2:100-103; Crameri, et al., (1996) Nat Biotechnol 14:315-319; Gates, et al., (1996) J Mol Biol 255:373-386; Stemmer, (1996) “Sexual PCR and Assembly PCR” In: The Encyclopedia of Molecular Biology. VCH Publishers, New York. pp. 447-457; Crameri and Stemmer, (1995) BioTechniques 18:194-195; Stemmer, et al., (1995) Gene, 164:49-53; Stemmer, (1995) Science 270: 1510; Stemmer, (1995) Bio/Technology 13:549-553; Stemmer, (1994) Nature 370:389-391 and Stemmer, (1994) PNAS USA 91:10747-10751.

[0052] Mutational methods of generating diversity include, for example, site-directed mutagenesis (Ling, et al., (1997) Anal Biochem 254(2):157-178; Dale, et al., (1996) Methods Mol Biol 57:369-374; Smith, (1985)Ann Rev Genet 19:423-462; Botstein and Shortie, (1985) Science 229:1193-1201; Carter, (1986) Biochem J 237:1-7 and Kunkel, (1987) “The efficiency of oligonucleotide directed mutagenesis” in Nucleic Acids & Molecular Biology (Eckstein and Lilley, eds., Springer Verlag, Berlin)); mutagenesis using uracil containing templates (Kunkel, (1985) PNAS USA 82:488-492; Kunkel, et al., (1987) Methods Enzymol 154:367-382 and Bass, et al., (1988) Science 242:240-245); oligonucleotide-directed mutagenesis (Zoller and Smith, (1983) Methods Enzymol 100:468-500; Zoller and Smith, (1987) Methods Enzymol 154:329-350 (1987); Zoller and Smith, (1982) Nucleic Acids Res 10:6487-6500), phosphorothioate-modified DNA mutagenesis (Taylor, et al., (1985) Nucl Acids Res 13:8749-8764; Taylor, et al., (1985) Nucl Acids Res 13:8765-8787 (1985); Nakamaye and Eckstein, (1986) Nucl Acids Res 14:9679-9698; Sayers, et al., (1988) Nucl Acids Res 16:791-802 and Sayers, et al., (1988) Nucl Acids Res 16:803-814); mutagenesis using gapped duplex DNA (Kramer, et al., (1984) Nucl Acids Res 12:9441-9456; Kramer and Fritz, (1987) Methods Enzymol 154:350-367; Kramer, et al., (1988) Nucl Acids Res 16:7207 and Fritz, et al., (1988) Nucl Acids Res 16:6987-6999).

[0053] Additional suitable methods include point mismatch repair (Kramer, et al., (1984) Cell 38:879-887), mutagenesis using repair-deficient host strains (Carter, et al., (1985) Nucl Acids Res 13:4431-4443 and Carter, (1987) Methods in Enzymol 154:382-403), deletion mutagenesis (Eghtedarzadeh and Henikoff, (1986) Nucl Acids Res 14:5115), restriction-selection and restriction-purification (Wells, et al., (1986) Phil Trans R Soc Lond A 317:415-423), mutagenesis by total gene synthesis (Nambiar, et al., (1984) Science 223:1299-1301; Sakamar and Khorana, (1988) Nucl Acids Res 14:6361-6372; Wells, et al., (1985) Gene 34:315-323 and Grundström, et al., (1985) Nucl Acids Res 13:3305-3316), double-strand break repair (Mandecki, (1986) PNAS USA, 83:7177-7181 and Arnold, (1993) Curr Opin Biotech 4:450-455). Additional details on many of the above methods can be found in Methods Enzymol Volume 154, which also describes useful controls for trouble-shooting problems with various mutagenesis methods.

[0054] Additional details regarding various diversity generating methods can be found in the following U.S. patents, PCT Publications and applications and EPO publications: U.S. Pat. Nos. 5,723,323, 5,763,192, 5,814,476, 5,817,483, 5,824,514, 5,976,862, 5,605,793, 5,811,238, 5,830,721, 5,834,252, 5,837,458, WO 1995/22625, WO 1996/33207, WO 1997/20078, WO 1997/35966, WO 1999/41402, WO 1999/41383, WO 1999/41369, WO 1999/41368, EP 752008, EP 0932670, WO 1999/23107, WO 1999/21979, WO 1998/31837, WO 1998/27230, WO 1998/27230, WO 2000/00632, WO 2000/09679, WO 1998/42832, WO 1999/29902, WO 1998/41653, WO 1998/41622, WO 1998/42727, WO 2000/18906, WO 2000/04190, WO 2000/42561, WO 2000/42559, WO 2000/42560, WO 2001/23401 and PCT/US01/06775.

[0055] The nucleotide sequences of the embodiments can also be used to isolate corresponding sequences from plants, including but not limited to ferns and other primitive plants. In this manner, methods such as PCR, hybridization, and the like can be used to identify such sequences based on their sequence homology to the sequences set forth herein. Sequences that are selected based on their sequence identity to the entire sequences set forth herein or to fragments thereof are encompassed by the embodiments. Such sequences include sequences that are orthologs of the disclosed sequences. The term “orthologs” refers to genes derived from a common ancestral gene and which are found in different species as a result of speciation. Genes found in different species are considered orthologs when their nucleotide sequences and/or their encoded protein sequences share substantial identity as defined elsewhere herein. Functions of orthologs are often highly conserved among species.

[0056] In a PCR approach, oligonucleotide primers can be designed for use in PCR reactions to amplify corresponding DNA sequences from cDNA or genomic DNA extracted from any organism of interest. Methods for designing PCR primers and PCR cloning are generally known in the art and are disclosed in Sambrook, et al., (1989) Molecular Cloning: A Laboratory Manual (2d ed., Cold Spring Harbor Laboratory Press, Plainview, N.Y.), hereinafter “Sambrook”. See also, Innis, et al., eds. (1990) PCR Protocols: A Guide to Methods and Applications (Academic Press, New York); Innis and Gelfand, eds. (1995) PCR Strategies (Academic Press, New York); and Innis and Gelfand, eds. (1999) PCR Methods Manual (Academic Press, New York). Known methods of PCR include, but are not limited to, methods using paired primers, nested primers, single specific primers, degenerate primers, gene-specific primers, vector-specific primers, partially-mismatched primers, and the like.

[0057] To identify potential IPD079 polypeptides from fern, moss or other primitive plant collections, the fern, moss or other primitive plant cell lysates can be screened with antibodies generated against an IPD079 polypeptides and/or IPD079 polypeptides using Western blotting and/or ELISA methods. This type of assays can be performed in a high throughput fashion. Positive samples can be further analyzed by various techniques such as antibody based protein purification and identification. Methods of generating antibodies are well known in the art as discussed infra.

[0058] Alternatively, mass spectrometry based protein identification method can be used to identify homologs of IPD079 polypeptides using protocols in the literatures (Scott Patterson, (1998), 10.22, 1-24, Current Protocol in Molecular Biology published by John Wiley & Son Inc.). Specifically, LC-MS/MS based protein identification method is used to associate the MS data of given cell lysate or desired molecular weight enriched samples (excised from SDS-PAGE gel of relevant molecular weight bands to IPD079 polypeptides) with sequence information of the IPD079 polypeptides disclosed herein, and their homologs. Any match in peptide sequences indicates the potential of having the homologous proteins in the samples. Additional techniques (protein purification and molecular biology) can be used to isolate the protein and identify the sequences of the homologs.

[0059] In hybridization methods, all or part of the pesticidal nucleic acid sequence can be used to screen cDNA or genomic libraries. Methods for construction of such cDNA and genomic libraries are generally known in the art and are disclosed in Sambrook and Russell, (2001), supra. The so-called hybridization probes may be genomic DNA fragments, cDNA fragments, RNA fragments or other oligonucleotides and may be labeled with a detectable group such as 32P or any other detectable marker, such as other radioisotopes, a fluorescent compound, an enzyme or an enzyme co-factor. Probes for hybridization can be made by labeling synthetic oligonucleotides based on the known IPD079 polypeptide-encoding nucleic acid sequence disclosed herein. Degenerate primers designed on the basis of conserved nucleotides or amino acid residues in the nucleic acid sequence or encoded amino acid sequence can additionally be used. The probe typically comprises a region of nucleic acid sequence that hybridizes under stringent conditions to at least about 12, at least about 25, at least about 50, 75, 100, 125, 150, 175 or 200 consecutive nucleotides of nucleic acid sequence encoding an IPD079 polypeptide of the disclosure or a fragment or variant thereof. Methods for the preparation of probes for hybridization are generally known in the art and are disclosed in Sambrook and Russell, (2001), supra, herein incorporated by reference.

[0060] For example, an entire nucleic acid sequence, encoding an IPD079 polypeptide, disclosed herein or one or more portions thereof may be used as a probe capable of specifically hybridizing to corresponding nucleic acid sequences encoding IPD079 polypeptide-like sequences and messenger RNAs. To achieve specific hybridization under a variety of conditions, such probes include sequences that are unique and are preferably at least about 10 nucleotides in length or at least about 20 nucleotides in length. Such probes may be used to amplify corresponding pesticidal sequences from a chosen organism by PCR. This technique may be used to isolate additional coding sequences from a desired organism or as a diagnostic assay to determine the presence of coding sequences in an organism. Hybridization techniques include hybridization screening of plated DNA libraries (either plaques or colonies; see, for example, Sambrook, et al., (1989) Molecular Cloning: A Laboratory Manual (2d ed., Cold Spring Harbor Laboratory Press, Cold Spring Harbor, N.Y.).

[0061] Hybridization of such sequences may be carried out under stringent conditions. “Stringent conditions” or “stringent hybridization conditions” is used herein to refer to conditions under which a probe will hybridize to its target sequence to a detectably greater degree than to other sequences (e.g., at least 2-fold over background). Stringent conditions are sequence-dependent and will be different in different circumstances. By controlling the stringency of the hybridization and/or washing conditions, target sequences that are 100% complementary to the probe can be identified (homologous probing). Alternatively, stringency conditions can be adjusted to allow some mismatching in sequences so that lower degrees of similarity are detected (heterologous probing). Generally, a probe is less than about 1000 nucleotides in length, preferably less than 500 nucleotides in length

[0062] Proteins and Variants and Fragments Thereof

[0063] Plant derived perforins and IPD079 polypeptides are also encompassed by the disclosure. “Plant derived perforins” as used herein refers to a polypeptide isolated from a plant or identified by proteomics from a plant genome or transcriptome comprising a MAC/Perforin (MACPF) Pfam domain (PF01823) or a variant thereof. “IPD079 polypeptide”, and “IPD079 protein” as used herein interchangeably refers to a plant derived perforin polypeptide having insecticidal activity including but not limited to insecticidal activity against one or more insect pests of the Lepidoptera and/or Coleoptera orders, and is sufficiently homologous to the protein of SEQ ID NO: 2 or SEQ ID NO: 56. A variety of IPD079 polypeptides are contemplated. In some embodiments the IPD079 polypeptide is derived from a fern species in the Division Pteridophyta. Sources of plant derived perforins and IPD079 polypeptides or related proteins are from plants species selected from but not limited to Adiantum, Adonis, Aglaomorpha, Asparagus, Asplenium, Bignonia, Blechnum, Bolbitis, Campyloneurum, Celosia, Cissus, Colysis, Davallia, Didymochlaena, Doellingeria, Dryopteris, Elaphoglossum, Equisetum, Hedera, Huperzia, Lycopodium, Lygodium, Marsilea, Matteuccia, Microsorum, Nephrolepis, Onoclea, Ophioglossum, Pandorea, Pellaea, Phormium, Platycerium, Polypodium, Polystichium, Prostanthera, Psilotum, Pteris, Rumohra, Schizophragma, Selaginella, Sphaeropteris, Stenochiaena, Symphoricarpos, Thelypteris, Tupidanthus, Verbascum, Vernonia, and Waldsteinia species. Sources of plant derived perforins and IPD079 polypeptides or related proteins are ferns and other primitive plant species selected from but not limited to Huperzia, Ophioglossum, Lycopodium, and Platycerium species. “IPD094 polypeptide”, and “IPD094 protein” as used herein interchangeably refers to a plant derived perforin polypeptide having insecticidal activity including but not limited to insecticidal activity against one or more insect pests of the Lepidoptera and/or Coleoptera orders, and is sufficiently homologous to the protein of SEQ ID NO: 144.

[0064] “Sufficiently homologous” is used herein to refer to an amino acid sequence that has at least about 40%, 45%, 50%, 51%, 52%, 53%, 54%, 55%, 56%, 57%, 58%, 59%, 60%, 61%, 62%, 63%, 64%, 65%, 66%, 67%, 68%, 69%, 70%, 71%, 72%, 73%, 74%, 75%, 76%, 77%, 78%, 79%, 80%, 81%, 82%, 83%, 84%, 85%, 86%, 87%, 88%, 89%, 90%, 91%, 92%, 93%, 94%, 95%, 96%, 97%, 98%, 99% or greater sequence homology compared to a reference sequence using one of the alignment programs described herein using standard parameters. The term “about” when used herein in context with percent sequence identity means+/−0.5%. In some embodiments the sequence homology is against the full length sequence of the polypeptide. One of skill in the art will recognize that these values can be appropriately adjusted to determine corresponding homology of proteins taking into account amino acid similarity and the like. In some embodiments the sequence identity is calculated using ClustalW algorithm in the ALIGNX® module of the Vector NTI® Program Suite (Invitrogen Corporation, Carlsbad, Calif.) with all default parameters. In some embodiments the sequence identity is across the entire length of polypeptide calculated using ClustalW algorithm in the ALIGNX® module of the Vector NTI® Program Suite (Invitrogen Corporation, Carlsbad, Calif.) with all default parameters.

[0065] As used herein, the terms “protein,” “peptide molecule,” or “polypeptide” includes any molecule that comprises five or more amino acids. It is well known in the art that protein, peptide or polypeptide molecules may undergo modification, including post-translational modifications, such as, but not limited to, disulfide bond formation, glycosylation, phosphorylation or oligomerization. Thus, as used herein, the terms “protein,” “peptide molecule” or “polypeptide” includes any protein that is modified by any biological or non-biological process. The terms “amino acid” and “amino acids” refer to all naturally occurring L-amino acids.

[0066] A “recombinant protein” is used herein to refer to a protein that is no longer in its natural environment, for example in vitro or in a recombinant bacterial or plant host cell. A polypeptide that is substantially free of cellular material includes preparations of protein having less than about 30%, 20%, 10% or 5% (by dry weight) of non-pesticidal protein (also referred to herein as a “contaminating protein”).

[0067] “Fragments” or “biologically active portions” include polypeptide fragments comprising amino acid sequences sufficiently identical to the polypeptide and that exhibit insecticidal activity. Such biologically active portions can be prepared by recombinant techniques and evaluated for insecticidal activity.

[0068] “Variants” as used herein refers to proteins or polypeptides having an amino acid sequence that is at least about 50%, 55%, 60%, 65%, 70%, 75%, 80%, 81%, 82%, 83%, 84%, 85%, 86%, 87%, 88%, 89%, 90%, 91%, 92%, 93%, 94%, 95%, 96%, 97%, 98% or 99% identical to the parental amino acid sequence. Variants can be in the form of amino acid substitutions; deletions, including but not limited to deletion of amino acids at the N-terminus and/or C-terminus; and additions, including but not limited to N-terminal and/or C-terminal, compared to the native polypeptide.

[0069] Plant Derived Perforins

[0070] In some embodiments the plant derived perforin comprises a MAC/Perforin (MACPF) Pfam domain (PF01823). In some embodiments the plant derived perforin is identified using proteomic methods known to one skilled in the art. In some embodiments the plant derived perforins is identified by BLAST and/or HMMSearch. In some embodiments the plant derived perforins matched the profile HMM of Pfam ID# IPR020864 with an E-value of less than 0.01 and having a length of greater than 250 amino acids. In some embodiments the plant derived perforin has at least 90%, 91%, 92%, 93%, 94%, 95%, 96%, 97%, 98%, 99% or greater amino acid sequence identity to any one of SEQ ID NOs: 158-1248. In some embodiments the plant derived perforin comprises the amino acid sequence of the polypeptide of any one of SEQ ID NOs: 158-1248, homologs thereof or variants thereof. In some embodiments the plant derived perforin has at least 90%, 91%, 92%, 93%, 94%, 95%, 96%, 97%, 98%, 99% or greater amino acid sequence identity to IPD094 polypeptide of SEQ ID NO: 144. In some embodiments the plant derived perforin is an IPD094 polypeptide of the disclosure, homologs thereof or variants thereof. In some embodiments the plant derived perforin is an IPD079 polypeptide of the disclosure.

[0071] Phylogenetic, Sequence Motif, and Structural Analyses for Insecticidal Protein Families

[0072] A sequence and structure analysis method can be employed and may be composed of four components: phylogenetic tree construction, protein sequence motifs finding, secondary structure prediction, and alignment of protein sequences and secondary structures. Details about each component are illustrated below.

[0073] 1) Phylogenetic Tree Construction

[0074] The phylogenetic analysis can be performed using the software MEGAS. Protein sequences were subjected to ClustalW version 2 analysis (Larkin M. A et al (2007) Bioinformatics 23(21): 2947-2948) for multiple sequence alignment. The evolutionary history is then inferred by the Maximum Likelihood method based on the JTT matrix-based model. The tree with the highest log likelihood is obtained, exported in Newick format, and further processed to extract the sequence IDs in the same order as they appeared in the tree. A few clades representing sub-families can be manually identified for each insecticidal protein family.

[0075] 2) Protein Sequence Motifs Finding

[0076] Protein sequences are re-ordered according to the phylogenetic tree built previously, and fed to the MOTIF analysis tool MEME (Multiple EM for MOTIF Elicitation) (Bailey T. L., and Elkan C., Proceedings of the Second International Conference on Intelligent Systems for Molecular Biology, pp. 28-36, AAAI Press, Menlo Park, Calif., 1994.) for identification of key sequence motifs. MEME is setup as follows: Minimum number of sites 2, Minimum motif width 5, and Maximum number of motifs 30. Sequence motifs unique to each sub-family were identified by visual observation. The distribution of MOTIFs across the entire gene family could be visualized in HTML webpage. The MOTIFs are numbered relative to the ranking of the E-value for each MOTIF.

[0077] 3) Secondary Structure Prediction

[0078] PSIPRED, top ranked secondary structure prediction method (Jones D T. (1999)J Mol. Biol. 292: 195-202), can be installed in a local Linux server, and used for protein secondary structure prediction. The tool provides accurate structure prediction using two feed-forward neural networks based on the PSI-BLAST output. The PSI-BLAST database is created by removing low-complexity, transmembrane, and coiled-coil regions in Uniref100. The PSIPRED results contain the secondary structures (Alpha helix: H, Beta strand: E, and Coil: C) and the corresponding confidence scores for each amino acid in a given protein sequence.

[0079] 4) Alignment of Protein Sequences and Secondary Structures

[0080] A script can be developed to generate gapped secondary structure alignment according to the multiple protein sequence alignment from step 1 for all proteins. All aligned protein sequences and structures are concatenated into a single FASTA file, and then imported into MEGA for visualization and identification of conserved structures.

[0081] In some embodiments an IPD079 polypeptide has a calculated molecular weight of between about 30 kD and about 70 kD, between about 40 kD and about 60 kD, between about 45 kD and about 55 kD, and between about 47.5 kD and about 52.5 kD. “About” with respect to molecular weight means±1 kD.

[0082] In some embodiments the IPD079 polypeptide has a modified physical property. As used herein, the term “physical property” refers to any parameter suitable for describing the physical-chemical characteristics of a protein. As used herein, “physical property of interest” and “property of interest” are used interchangeably to refer to physical properties of proteins that are being investigated and/or modified. Examples of physical properties include, but are not limited to net surface charge and charge distribution on the protein surface, net hydrophobicity and hydrophobic residue distribution on the protein surface, surface charge density, surface hydrophobicity density, total count of surface ionizable groups, surface tension, protein size and its distribution in solution, melting temperature, heat capacity, and second virial coefficient. Examples of physical properties also include, but are not limited to solubility, folding, stability, and digestibility. In some embodiments the IPD079 polypeptide has increased digestibility of proteolytic fragments in an insect gut. Models for digestion by simulated gastric fluids are known to one skilled in the art (Fuchs, R. L. and J. D. Astwood. Food Technology 50: 83-88, 1996; Astwood, J. D., et al Nature Biotechnology 14: 1269-1273, 1996; Fu T J et al J. Agric Food Chem. 50: 7154-7160, 2002).

[0083] In some embodiments variants include polypeptides that differ in amino acid sequence due to mutagenesis. Variant proteins encompassed by the disclosure are biologically active, that is they continue to possess the desired biological activity (i.e. pesticidal activity) of the native protein. In some embodiment the variant will have at least about 10%, at least about 30%, at least about 50%, at least about 70%, at least about 80% or more of the insecticidal activity of the native protein. In some embodiments, the variants may have improved activity over the native protein.

[0084] Bacterial genes quite often possess multiple methionine initiation codons in proximity to the start of the open reading frame. Often, translation initiation at one or more of these start codons will lead to generation of a functional protein. These start codons can include ATG codons. However, bacteria such as Bacillus sp. also recognize the codon GTG as a start codon, and proteins that initiate translation at GTG codons contain a methionine at the first amino acid. On rare occasions, translation in bacterial systems can initiate at a TTG codon, though in this event the TTG encodes a methionine. Furthermore, it is not often determined a priori which of these codons are used naturally in the bacterium. Thus, it is understood that use of one of the alternate methionine codons may also lead to generation of pesticidal proteins. These pesticidal proteins are encompassed in the present disclosure and may be used in the methods of the present disclosure. It will be understood that, when expressed in plants, it will be necessary to alter the alternate start codon to ATG for proper translation.

[0085] One skilled in the art understands that the polynucleotide coding sequence can be modified to add a codon at the penultimate position following the methionine start codon to create a restriction enzyme site for recombinant cloning purposes and/or for expression purposes. In some embodiments the IPD079 polypeptide further comprises an alanine residue at the residue position immediately following the translation initiator methionine.

[0086] In some embodiments the translation initiator methionine of the IPD079 polypeptide is cleaved off post translationally. One skilled in the art understands that the N-terminal translation initiator methionine can be removed by methionine aminopeptidase in many cellular expression systems.

[0087] In another embodiment the plant derived perforins including but not limited to the IPD079 polypeptide may be expressed as a precursor protein with an intervening sequence that catalyzes multi-step, post translational protein splicing. Protein splicing involves the excision of an intervening sequence from a polypeptide with the concomitant joining of the flanking sequences to yield a new polypeptide (Chong, et al., (1996) J Biol. Chem., 271:22159-22168). This intervening sequence or protein splicing element, referred to as inteins, which catalyze their own excision through three coordinated reactions at the N-terminal and C-terminal splice junctions: an acyl rearrangement of the N-terminal cysteine or serine; a transesterfication reaction between the two termini to form a branched ester or thioester intermediate and peptide bond cleavage coupled to cyclization of the intein C-terminal asparagine to free the intein (Evans, et al., (2000) J. Biol. Chem., 275:9091-9094. The elucidation of the mechanism of protein splicing has led to a number of intein-based applications (Comb, et al., U.S. Pat. No. 5,496,714; Comb, et al., U.S. Pat. No. 5,834,247; Camarero and Muir, (1999) J. Amer. Chem. Soc. 121:5597-5598; Chong, et al., (1997) Gene 192:271-281, Chong, et al., (1998) Nucleic Acids Res. 26:5109-5115; Chong, et al., (1998) J. Biol. Chem. 273:10567-10577; Cotton, et al., (1999) J. Am. Chem. Soc. 121:1100-1101; Evans, et al., (1999) J. Biol. Chem. 274:18359-18363; Evans, et al., (1999) J. Biol. Chem. 274:3923-3926; Evans, et al., (1998) Protein Sci. 7:2256-2264; Evans, et al., (2000) J. Biol. Chem. 275:9091-9094; Iwai and Pluckthun, (1999) FEBS Lett. 459:166-172; Mathys, et al., (1999) Gene 231:1-13; Mills, et al., (1998) Proc. Natl. Acad. Sci. USA 95:3543-3548; Muir, et al., (1998) Proc. Natl. Acad. Sci. USA 95:6705-6710; Otomo, et al., (1999) Biochemistry 38:16040-16044; Otomo, et al., (1999) J. Biolmol. NMR 14:105-114; Scott, et al., (1999) Proc. Natl. Acad. Sci. USA 96:13638-13643; Severinov and Muir, (1998) J Biol. Chem. 273:16205-16209; Shingledecker, et al., (1998) Gene 207:187-195; Southworth, et al., (1998) EMBO J. 17:918-926; Southworth, et al., (1999) Biotechniques 27:110-120; Wood, et al., (1999) Nat. Biotechnol. 17:889-892; Wu, et al., (1998a) Proc. Natl. Acad. Sci. USA 95:9226-9231; Wu, et al., (1998b) Biochim Biophys Acta 1387:422-432; Xu, et al., (1999) Proc. Natl. Acad. Sci. USA 96:388-393; Yamazaki, et al., (1998) 1 Am. Chem. Soc., 120:5591-5592). For the application of inteins in plant transgenes, see, Yang, et al., (Transgene Res 15:583-593 (2006)) and Evans, et al., (Annu. Rev. Plant Biol. 56:375-392 (2005)).

[0088] In another embodiment the plant derived perforin, including but not limited to a IPD079 polypeptide, may be encoded by two separate genes where the intein of the precursor protein comes from the two genes, referred to as a split-intein, and the two portions of the precursor are joined by a peptide bond formation. This peptide bond formation is accomplished by intein-mediated trans-splicing. For this purpose, a first and a second expression cassette comprising the two separate genes further code for inteins capable of mediating protein trans-splicing. By trans-splicing, the proteins and polypeptides encoded by the first and second fragments may be linked by peptide bond formation. Trans-splicing inteins may be selected from the nucleolar and organellar genomes of different organisms including eukaryotes, archaebacteria and eubacteria. Inteins that may be used for are listed at neb.com/neb/inteins.html, which can be accessed on the world-wide web using the “www” prefix). The nucleotide sequence coding for an intein may be split into a 5′ and a 3′ part that code for the 5′ and the 3′ part of the intein, respectively. Sequence portions not necessary for intein splicing (e.g. homing endonuclease domain) may be deleted. The intein coding sequence is split such that the 5′ and the 3′ parts are capable of trans-splicing. For selecting a suitable splitting site of the intein coding sequence, the considerations published by Southworth, et al., (1998) EMBO J. 17:918-926 may be followed. In constructing the first and the second expression cassette, the 5′ intein coding sequence is linked to the 3′ end of the first fragment coding for the N-terminal part of the IPD079 polypeptide and the 3′ intein coding sequence is linked to the 5′ end of the second fragment coding for the C-terminal part of the IPD079 polypeptide.

[0089] In general, the trans-splicing partners can be designed using any split intein, including any naturally-occurring or artificially-split split intein. Several naturally-occurring split inteins are known, for example: the split intein of the DnaE gene of Synechocystis sp. PCC6803 (see, Wu, et al., (1998) Proc Natl Acad Sci USA. 95(16):9226-31 and Evans, et al., (2000) J Biol Chem. 275(13):9091-4 and of the DnaE gene from Nostoc punctiforme (see, Iwai, et al., (2006) FEBS Lett. 580(7):1853-8). Non-split inteins have been artificially split in the laboratory to create new split inteins, for example: the artificially split Ssp DnaB intein (see, Wu, et al., (1998) Biochim Biophys Acta. 1387:422-32) and split Sce VMA intein (see, Brenzel, et al., (2006) Biochemistry. 45(6):1571-8) and an artificially split fungal mini-intein (see, Elleuche, et al., (2007) Biochem Biophys Res Commun. 355(3):830-4). There are also intein databases available that catalogue known inteins (see for example the online-database available at: bioinformatics.weizmann.ac.il/\tilde{ } pietro/inteins/Inteinstable.html, which can be accessed on the world-wide web using the “www” prefix).

[0090] Naturally-occurring non-split inteins may have endonuclease or other enzymatic activities that can typically be removed when designing an artificially-split split intein. Such mini-inteins or minimized split inteins are well known in the art and are typically less than 200 amino acid residues long (see, Wu, et al., (1998) Biochim Biophys Acta. 1387:422-32). Suitable split inteins may have other purification enabling polypeptide elements added to their structure, provided that such elements do not inhibit the splicing of the split intein or are added in a manner that allows them to be removed prior to splicing. Protein splicing has been reported using proteins that comprise bacterial intein-like (BIL) domains (see, Amitai, et al., (2003) Mol Microbiol. 47:61-73) and hedgehog (Hog) auto-processing domains (the latter is combined with inteins when referred to as the Hog/intein superfamily or HINT family (see, Dassa, et al., (2004) J Biol Chem. 279:32001-7) and domains such as these may also be used to prepare artificially-split inteins. In particular, non-splicing members of such families may be modified by molecular biology methodologies to introduce or restore splicing activity in such related species. Recent studies demonstrate that splicing can be observed when a N-terminal split intein component is allowed to react with a C-terminal split intein component not found in nature to be its “partner”; for example, splicing has been observed utilizing partners that have as little as 30 to 50% homology with the “natural” splicing partner (see, Dassa, et al., (2007) Biochemistry. 46(1):322-30). Other such mixtures of disparate split intein partners have been shown to be unreactive one with another (see, Brenzel, et al., (2006) Biochemistry. 45(6):1571-8). However, it is within the ability of a person skilled in the relevant art to determine whether a particular pair of polypeptides is able to associate with each other to provide a functional intein, using routine methods and without the exercise of inventive skill.

[0091] In another embodiment the plant derived perforins, including but not limited to an IPD079 polypeptide, is a circular permuted variant. In certain embodiments the IPD079 polypeptide is a circular permuted variant of a IPD079 polypeptide disclosed herein.

[0092] The development of recombinant DNA methods has made it possible to study the effects of sequence transposition on protein folding, structure and function. The approach used in creating new sequences resembles that of naturally occurring pairs of proteins that are related by linear reorganization of their amino acid sequences (Cunningham, et al., (1979) Proc. Natl. Acad. Sci. U.S.A. 76:3218-3222; Teather and Erfle, (1990) J. Bacteriol. 172:3837-3841; Schimming, et al., (1992) Eur. J. Biochem. 204:13-19; Yamiuchi and Minamikawa, (1991) FEBS Lett. 260:127-130; MacGregor, et al., (1996) FEBS Lett. 378:263-266). The first in vitro application of this type of rearrangement to proteins was described by Goldenberg and Creighton (J. Mol. Biol. 165:407-413, 1983). In creating a circular permuted variant a new N-terminus is selected at an internal site (breakpoint) of the original sequence, the new sequence having the same order of amino acids as the original from the breakpoint until it reaches an amino acid that is at or near the original C-terminus. At this point the new sequence is joined, either directly or through an additional portion of sequence (linker), to an amino acid that is at or near the original N-terminus and the new sequence continues with the same sequence as the original until it reaches a point that is at or near the amino acid that was N-terminal to the breakpoint site of the original sequence, this residue forming the new C-terminus of the chain. The length of the amino acid sequence of the linker can be selected empirically or with guidance from structural information or by using a combination of the two approaches. When no structural information is available, a small series of linkers can be prepared for testing using a design whose length is varied in order to span a range from 0 to 50 Å and whose sequence is chosen in order to be consistent with surface exposure (hydrophilicity, Hopp and Woods, (1983) Mol. Immunol. 20:483-489; Kyte and Doolittle, (1982) J. Mol. Biol. 157:105-132; solvent exposed surface area, Lee and Richards, (1971) J. Mol. Biol. 55:379-400) and the ability to adopt the necessary conformation without deranging the configuration of the pesticidal polypeptide (conformationally flexible; Karplus and Schulz, (1985) Naturwissenschaften 72:212-213). Assuming an average of translation of 2.0 to 3.8 Å per residue, this would mean the length to test would be between 0 to 30 residues, with 0 to 15 residues being the preferred range. Exemplary of such an empirical series would be to construct linkers using a cassette sequence such as Gly-Gly-Gly-Ser repeated n times, where n is 1, 2, 3 or 4. Those skilled in the art will recognize that there are many such sequences that vary in length or composition that can serve as linkers with the primary consideration being that they be neither excessively long nor short (cf., Sandhu, (1992) Critical Rev. Biotech. 12:437-462); if they are too long, entropy effects will likely destabilize the three-dimensional fold, and may also make folding kinetically impractical, and if they are too short, they will likely destabilize the molecule because of torsional or steric strain. Those skilled in the analysis of protein structural information will recognize that using the distance between the chain ends, defined as the distance between the c-alpha carbons, can be used to define the length of the sequence to be used or at least to limit the number of possibilities that must be tested in an empirical selection of linkers. They will also recognize that it is sometimes the case that the positions of the ends of the polypeptide chain are ill-defined in structural models derived from x-ray diffraction or nuclear magnetic resonance spectroscopy data, and that when true, this situation will therefore need to be taken into account in order to properly estimate the length of the linker required. From those residues whose positions are well defined are selected two residues that are close in sequence to the chain ends, and the distance between their c-alpha carbons is used to calculate an approximate length for a linker between them. Using the calculated length as a guide, linkers with a range of number of residues (calculated using 2 to 3.8 Å per residue) are then selected. These linkers may be composed of the original sequence, shortened or lengthened as necessary, and when lengthened the additional residues may be chosen to be flexible and hydrophilic as described above; or optionally the original sequence may be substituted for using a series of linkers, one example being the Gly-Gly-Gly-Ser cassette approach mentioned above; or optionally a combination of the original sequence and new sequence having the appropriate total length may be used. Sequences of pesticidal polypeptides capable of folding to biologically active states can be prepared by appropriate selection of the beginning (amino terminus) and ending (carboxyl terminus) positions from within the original polypeptide chain while using the linker sequence as described above. Amino and carboxyl termini are selected from within a common stretch of sequence, referred to as a breakpoint region, using the guidelines described below. A novel amino acid sequence is thus generated by selecting amino and carboxyl termini from within the same breakpoint region. In many cases the selection of the new termini will be such that the original position of the carboxyl terminus immediately preceded that of the amino terminus. However, those skilled in the art will recognize that selections of termini anywhere within the region may function, and that these will effectively lead to either deletions or additions to the amino or carboxyl portions of the new sequence. It is a central tenet of molecular biology that the primary amino acid sequence of a protein dictates folding to the three-dimensional structure necessary for expression of its biological function. Methods are known to those skilled in the art to obtain and interpret three-dimensional structural information using x-ray diffraction of single protein Crystals or nuclear magnetic resonance spectroscopy of protein solutions. Examples of structural information that are relevant to the identification of breakpoint regions include the location and type of protein secondary structure (alpha and 3-10 helices, parallel and anti-parallel beta sheets, chain reversals and turns, and loops; Kabsch and Sander, (1983) Biopolymers 22:2577-2637; the degree of solvent exposure of amino acid residues, the extent and type of interactions of residues with one another (Chothia, (1984) Ann. Rev. Biochem. 53:537-572) and the static and dynamic distribution of conformations along the polypeptide chain (Alber and Mathews, (1987) Methods Enzymol. 154:511-533). In some cases additional information is known about solvent exposure of residues; one example is a site of post-translational attachment of carbohydrate which is necessarily on the surface of the protein. When experimental structural information is not available or is not feasible to obtain, methods are also available to analyze the primary amino acid sequence in order to make predictions of protein tertiary and secondary structure, solvent accessibility and the occurrence of turns and loops. Biochemical methods are also sometimes applicable for empirically determining surface exposure when direct structural methods are not feasible; for example, using the identification of sites of chain scission following limited proteolysis in order to infer surface exposure (Gentile and Salvatore, (1993) Eur. J. Biochem. 218:603-621). Thus using either the experimentally derived structural information or predictive methods (e.g., Srinivisan and Rose, (1995) Proteins: Struct., Funct. & Genetics 22:81-99) the parental amino acid sequence is inspected to classify regions according to whether or not they are integral to the maintenance of secondary and tertiary structure. The occurrence of sequences within regions that are known to be involved in periodic secondary structure (alpha and 3-10 helices, parallel and anti-parallel beta sheets) are regions that should be avoided. Similarly, regions of amino acid sequence that are observed or predicted to have a low degree of solvent exposure are more likely to be part of the so-called hydrophobic core of the protein and should also be avoided for selection of amino and carboxyl termini. In contrast, those regions that are known or predicted to be in surface turns or loops, and especially those regions that are known not to be required for biological activity, are the preferred sites for location of the extremes of the polypeptide chain. Continuous stretches of amino acid sequence that are preferred based on the above criteria are referred to as a breakpoint region. Polynucleotides encoding circular permuted IPD079 polypeptides with new N-terminus/C-terminus which contain a linker region separating the original C-terminus and N-terminus can be made essentially following the method described in Mullins, et al., (1994) 1 Am. Chem. Soc. 116:5529-5533. Multiple steps of polymerase chain reaction (PCR) amplifications are used to rearrange the DNA sequence encoding the primary amino acid sequence of the protein. Polynucleotides encoding circular permuted IPD079 polypeptides with new N-terminus/C-terminus which contain a linker region separating the original C-terminus and N-terminus can be made based on the tandem-duplication method described in Horlick, et al., (1992) Protein Eng. 5:427-431. Polymerase chain reaction (PCR) amplification of the new N-terminus/C-terminus genes is performed using a tandemly duplicated template DNA.

[0093] In another embodiment fusion proteins are provided comprising a plant derived perforins, including but not limited to the IPD079 polypeptides of the disclosure. In some embodiments the fusion proteins comprise an IPD079 polypeptide including but not limited to the IPD079 polypeptides disclosed herein, and active fragments thereof.

[0094] Methods for design and construction of fusion proteins (and polynucleotides encoding same) are known to those of skill in the art. Polynucleotides encoding a plant derived perforins or an IPD079 polypeptide may be fused to signal sequences which will direct the localization of the protein to particular compartments of a prokaryotic or eukaryotic cell and/or direct the secretion of the IPD079 polypeptide of the embodiments from a prokaryotic or eukaryotic cell. For example, in E. coli, one may wish to direct the expression of the protein to the periplasmic space. Examples of signal sequences or proteins (or fragments thereof) to which the IPD079 polypeptide may be fused in order to direct the expression of the polypeptide to the periplasmic space of bacteria include, but are not limited to, the pelB signal sequence, the maltose binding protein (MBP) signal sequence, MBP, the ompA signal sequence, the signal sequence of the periplasmic E. coli heat-labile enterotoxin B-subunit and the signal sequence of alkaline phosphatase. Several vectors are commercially available for the construction of fusion proteins which will direct the localization of a protein, such as the pMAL series of vectors (particularly the pMAL-p series) available from New England Biolabs. In a specific embodiment, the IPD079 polypeptide may be fused to the pelB pectate lyase signal sequence to increase the efficiency of expression and purification of such polypeptides in Gram-negative bacteria (see, U.S. Pat. Nos. 5,576,195 and 5,846,818). Plant plastid transit peptide/polypeptide fusions are well known in the art (see, U.S. Pat. No. 7,193,133). Apoplast transit peptides such as rice or barley alpha-amylase secretion signal are also well known in the art. The plastid transit peptide is generally fused N-terminal to the polypeptide to be targeted (e.g., the fusion partner). In one embodiment, the fusion protein consists essentially of the plastid transit peptide and the IPD079 polypeptide to be targeted. In another embodiment, the fusion protein comprises the plastid transit peptide and the polypeptide to be targeted. In such embodiments, the plastid transit peptide is preferably at the N-terminus of the fusion protein. However, additional amino acid residues may be N-terminal to the plastid transit peptide providing that the fusion protein is at least partially targeted to a plastid. In a specific embodiment, the plastid transit peptide is in the N-terminal half, N-terminal third or N-terminal quarter of the fusion protein. Most or all of the plastid transit peptide is generally cleaved from the fusion protein upon insertion into the plastid. The position of cleavage may vary slightly between plant species, at different plant developmental stages, as a result of specific intercellular conditions or the particular combination of transit peptide/fusion partner used. In one embodiment, the plastid transit peptide cleavage is homogenous such that the cleavage site is identical in a population of fusion proteins. In another embodiment, the plastid transit peptide is not homogenous, such that the cleavage site varies by 1-10 amino acids in a population of fusion proteins. The plastid transit peptide can be recombinantly fused to a second protein in one of several ways. For example, a restriction endonuclease recognition site can be introduced into the nucleotide sequence of the transit peptide at a position corresponding to its C-terminal end and the same or a compatible site can be engineered into the nucleotide sequence of the protein to be targeted at its N-terminal end. Care must be taken in designing these sites to ensure that the coding sequences of the transit peptide and the second protein are kept “in frame” to allow the synthesis of the desired fusion protein. In some cases, it may be preferable to remove the initiator methionine codon of the second protein when the new restriction site is introduced. The introduction of restriction endonuclease recognition sites on both parent molecules and their subsequent joining through recombinant DNA techniques may result in the addition of one or more extra amino acids between the transit peptide and the second protein. This generally does not affect targeting activity as long as the transit peptide cleavage site remains accessible and the function of the second protein is not altered by the addition of these extra amino acids at its N-terminus. Alternatively, one skilled in the art can create a precise cleavage site between the transit peptide and the second protein (with or without its initiator methionine) using gene synthesis (Stemmer, et al., (1995) Gene 164:49-53) or similar methods. In addition, the transit peptide fusion can intentionally include amino acids downstream of the cleavage site. The amino acids at the N-terminus of the mature protein can affect the ability of the transit peptide to target proteins to plastids and/or the efficiency of cleavage following protein import. This may be dependent on the protein to be targeted. See, e.g., Comai, et al., (1988) J Biol. Chem. 263(29):15104-9.

[0095] In some embodiments fusion proteins are provide comprising a plant derived perforin, including but not limited to an IPD079 polypeptide, and an insecticidal polypeptide joined by an amino acid linker. In some embodiments fusion proteins are provided represented by a formula selected from the group consisting of:

R¹-L-R²,R²-L-R′,R′-R² or R²-R¹

[0096] wherein R¹ is a plant derived perforin or an IPD079 polypeptide, R² is a protein of interest. The R¹ polypeptide is fused either directly or through a linker (L) segment to the R² polypeptide. The term “directly” defines fusions in which the polypeptides are joined without a peptide linker. Thus “L” represents a chemical bound or polypeptide segment to which both R¹ and R² are fused in frame, most commonly L is a linear peptide to which R¹ and R² are bound by amide bonds linking the carboxy terminus of R¹ to the amino terminus of L and carboxy terminus of L to the amino terminus of R². By “fused in frame” is meant that there is no translation termination or disruption between the reading frames of R¹ and R². The linking group (L) is generally a polypeptide of between 1 and 500 amino acids in length. The linkers joining the two molecules are preferably designed to (1) allow the two molecules to fold and act independently of each other, (2) not have a propensity for developing an ordered secondary structure which could interfere with the functional domains of the two proteins, (3) have minimal hydrophobic or charged characteristic which could interact with the functional protein domains and (4) provide steric separation of R¹ and R² such that R¹ and R² could interact simultaneously with their corresponding receptors on a single cell. Typically surface amino acids in flexible protein regions include Gly, Asn and Ser. Virtually any permutation of amino acid sequences containing Gly, Asn and Ser would be expected to satisfy the above criteria for a linker sequence. Other neutral amino acids, such as Thr and Ala, may also be used in the linker sequence. Additional amino acids may also be included in the linkers due to the addition of unique restriction sites in the linker sequence to facilitate construction of the fusions.

[0097] In some embodiments the linkers comprise sequences selected from the group of formulas: (Gly₃Ser)ₙ, (Gly₄Ser)ₙ, (Gly₅Ser)ₙ, (GlyₙSer)ₙ or (AlaGlySer)ₙ where n is an integer. One example of a highly-flexible linker is the (GlySer)-rich spacer region present within the pIII protein of the filamentous bacteriophages, e.g. bacteriophages M13 or fd (Schaller, et al., 1975). This region provides a long, flexible spacer region between two domains of the pIII surface protein. Also included are linkers in which an endopeptidase recognition sequence is included. Such a cleavage site may be valuable to separate the individual components of the fusion to determine if they are properly folded and active in vitro. Examples of various endopeptidases include, but are not limited to, Plasmin, Enterokinase, Kallikerin, Urokinase, Tissue Plasminogen activator, clostripain, Chymosin, Collagenase, Russell's Viper Venom Protease, Postproline cleavage enzyme, V8 protease, Thrombin and factor Xa. In some embodiments the linker comprises the amino acids EEKKN (SEQ ID NO: 157) from the multi-gene expression vehicle (MGEV), which is cleaved by vacuolar proteases as disclosed in US Patent Application Publication Number US 2007/0277263. In other embodiments, peptide linker segments from the hinge region of heavy chain immunoglobulins IgG, IgA, IgM, IgD or IgE provide an angular relationship between the attached polypeptides. Especially useful are those hinge regions where the cysteines are replaced with serines. Linkers of the present disclosure include sequences derived from murine IgG gamma 2b hinge region in which the cysteines have been changed to serines. The fusion proteins are not limited by the form, size or number of linker sequences employed and the only requirement of the linker is that functionally it does not interfere adversely with the folding and function of the individual molecules of the fusion.

[0098] In another embodiment chimeric IPD079 polypeptides are provided that are created through joining two or more portions of IPD079 genes, which originally encoded separate IPD079 proteins to create a chimeric gene. The translation of the chimeric gene results in a single chimeric IPD079 polypeptide with regions, motifs or domains derived from each of the original polypeptides. In certain embodiments the chimeric protein comprises portions, motifs or domains of IPD079 polypeptides disclosed herein in any combination.

[0099] It is recognized that DNA sequences may be altered by various methods, and that these alterations may result in DNA sequences encoding proteins with amino acid sequences different than that encoded by the wild-type (or native) pesticidal protein. In some embodiments an IPD079 polypeptide may be altered in various ways including amino acid substitutions, deletions, truncations and insertions of one or more amino acids, including up to 2, 3, 4, 5, 6, 7, 8, 9, 10, 15, 20, 25, 30, 35, 40, 45, 50, 55, 60, 65, 70, 75, 80, 85, 90, 100, 105, 110, 115, 120, 125, 130, 135, 140, 145 or more amino acid substitutions, deletions and/or insertions or combinations thereof compared to any one of the IPD079 polypeptides disclosed herein.

[0100] Methods for such manipulations are generally known in the art. For example, amino acid sequence variants of an IPD079 polypeptide can be prepared by mutations in the DNA. This may also be accomplished by one of several forms of mutagenesis and/or in directed evolution. In some aspects, the changes encoded in the amino acid sequence will not substantially affect the function of the protein. Such variants will possess the desired pesticidal activity. However, it is understood that the ability of an IPD079 polypeptide to confer pesticidal activity may be improved by the use of such techniques upon the compositions of this disclosure.

[0101] For example, conservative amino acid substitutions may be made at one or more nonessential amino acid residues. A “nonessential” amino acid residue is a residue that can be altered from the wild-type sequence of an IPD079 polypeptide without altering the biological activity. A “conservative amino acid substitution” is one in which the amino acid residue is replaced with an amino acid residue having a similar side chain. Families of amino acid residues having similar side chains have been defined in the art. These families include: amino acids with basic side chains (e.g., lysine, arginine, histidine); acidic side chains (e.g., aspartic acid, glutamic acid); polar, negatively charged residues and their amides (e.g., aspartic acid, asparagine, glutamic, acid, glutamine; uncharged polar side chains (e.g., glycine, asparagine, glutamine, serine, threonine, tyrosine, cysteine); small aliphatic, nonpolar or slightly polar residues (e.g., Alanine, serine, threonine, proline, glycine); nonpolar side chains (e.g., alanine, valine, leucine, isoleucine, proline, phenylalanine, methionine, tryptophan); large aliphatic, nonpolar residues (e.g., methionine, leucine, isoleucine, valine, cysteine); beta-branched side chains (e.g., threonine, valine, isoleucine); aromatic side chains (e.g., tyrosine, phenylalanine, tryptophan, histidine); large aromatic side chains (e.g., tyrosine, phenylalanine, tryptophan).

[0102] Amino acid substitutions may be made in nonconserved regions that retain function. In general, such substitutions would not be made for conserved amino acid residues or for amino acid residues residing within a conserved motif, where such residues are essential for protein activity. Examples of residues that are conserved and that may be essential for protein activity include, for example, residues that are identical between all proteins contained in an alignment of similar or related toxins to the sequences of the embodiments (e.g., residues that are identical in an alignment of homologous proteins). Examples of residues that are conserved but that may allow conservative amino acid substitutions and still retain activity include, for example, residues that have only conservative substitutions between all proteins contained in an alignment of similar or related toxins to the sequences of the embodiments (e.g., residues that have only conservative substitutions between all proteins contained in the alignment homologous proteins). However, one of skill in the art would understand that functional variants may have minor conserved or nonconserved alterations in the conserved residues. Guidance as to appropriate amino acid substitutions that do not affect biological activity of the protein of interest may be found in the model of Dayhoff, et al., (1978) Atlas of Protein Sequence and Structure (Natl. Biomed. Res. Found., Washington, D.C.).

[0103] In making such changes, the hydropathic index of amino acids may be considered. The importance of the hydropathic amino acid index in conferring interactive biologic function on a protein is generally understood in the art (Kyte and Doolittle, (1982) J Mol Biol. 157(1):105-32). It is accepted that the relative hydropathic character of the amino acid contributes to the secondary structure of the resultant protein, which in turn defines the interaction of the protein with other molecules, for example, enzymes, substrates, receptors, DNA, antibodies, antigens, and the like.

[0104] It is known in the art that certain amino acids may be substituted by other amino acids having a similar hydropathic index or score and still result in a protein with similar biological activity, i.e., still obtain a biological functionally equivalent protein. Each amino acid has been assigned a hydropathic index on the basis of its hydrophobicity and charge characteristics (Kyte and Doolittle, ibid). These are: isoleucine (+4.5); valine (+4.2); leucine (+3.8); phenylalanine (+2.8); cysteine/cystine (+2.5); methionine (+1.9); alanine (+1.8); glycine (−0.4); threonine (−0.7); serine (−0.8); tryptophan (−0.9); tyrosine (−1.3); proline (−1.6); histidine (−3.2); glutamate (−3.5); glutamine (−3.5); aspartate (−3.5); asparagine (−3.5); lysine (−3.9) and arginine (−4.5). In making such changes, the substitution of amino acids whose hydropathic indices are within +2 is preferred, those which are within +1 are particularly preferred, and those within +0.5 are even more particularly preferred.

[0105] It is also understood in the art that the substitution of like amino acids can be made effectively on the basis of hydrophilicity. U.S. Pat. No. 4,554,101, states that the greatest local average hydrophilicity of a protein, as governed by the hydrophilicity of its adjacent amino acids, correlates with a biological property of the protein.

[0106] As detailed in U.S. Pat. No. 4,554,101, the following hydrophilicity values have been assigned to amino acid residues: arginine (+3.0); lysine (+3.0); aspartate (+3.0.+0.1); glutamate (+3.0.+0.1); serine (+0.3); asparagine (+0.2); glutamine (+0.2); glycine (0); threonine (−0.4); proline (−0.5.+0.1); alanine (−0.5); histidine (−0.5); cysteine (−1.0); methionine (−1.3); valine (−1.5); leucine (−1.8); isoleucine (−1.8); tyrosine (−2.3); phenylalanine (−2.5); tryptophan (−3.4).

[0107] Alternatively, alterations may be made to the protein sequence of many proteins at the amino or carboxy terminus without substantially affecting activity. This can include insertions, deletions or alterations introduced by modern molecular methods, such as PCR, including PCR amplifications that alter or extend the protein coding sequence by virtue of inclusion of amino acid encoding sequences in the oligonucleotides utilized in the PCR amplification. Alternatively, the protein sequences added can include entire protein-coding sequences, such as those used commonly in the art to generate protein fusions. Such fusion proteins are often used to (1) increase expression of a protein of interest (2) introduce a binding domain, enzymatic activity or epitope to facilitate either protein purification, protein detection or other experimental uses known in the art (3) target secretion or translation of a protein to a subcellular organelle, such as the periplasmic space of Gram-negative bacteria, mitochondria or chloroplasts of plants or the endoplasmic reticulum of eukaryotic cells, the latter of which often results in glycosylation of the protein.

[0108] Variant nucleotide and amino acid sequences of the disclosure also encompass sequences derived from mutagenic and recombinogenic procedures such as DNA shuffling. With such a procedure, for example, one or more different IPD079 polypeptide coding regions of the disclosure can be used to create a new IPD079 polypeptide possessing the desired properties. In this manner, libraries of recombinant polynucleotides are generated from a population of related sequence polynucleotides comprising sequence regions that have substantial sequence identity and can be homologously recombined in vitro or in vivo. For example, using this approach, sequence motifs encoding a domain of interest may be shuffled between a pesticidal gene and other known pesticidal genes to obtain a new gene coding for a protein with an improved property of interest, such as an increased insecticidal activity. Strategies for such DNA shuffling are known in the art. See, for example, Stemmer, (1994) Proc. Natl. Acad. Sci. USA 91:10747-10751; Stemmer, (1994) Nature 370:389-391; Crameri, et al., (1997) Nature Biotech. 15:436-438; Moore, et al., (1997)J Mol. Biol. 272:336-347; Zhang, et al., (1997) Proc. Natl. Acad. Sci. USA 94:4504-4509; Crameri, et al., (1998) Nature 391:288-291; and U.S. Pat. Nos. 5,605,793 and 5,837,458.

[0109] Domain swapping or shuffling is another mechanism for generating altered IPD079 polypeptides. Domains may be swapped between IPD079 polypeptides of the disclosure resulting in hybrid or chimeric toxins with improved insecticidal activity or target spectrum. Methods for generating recombinant proteins and testing them for pesticidal activity are well known in the art (see, for example, Naimov, et al., (2001) Appl. Environ. Microbiol. 67:5328-5330; de Maagd, et al., (1996) Appl. Environ. Microbiol. 62:1537-1543; Ge, et al., (1991) J. Biol. Chem. 266:17954-17958; Schnepf, et al., (1990) J. Biol. Chem. 265:20923-20930; Rang, et al., 91999) Appl. Environ. Microbiol. 65:2918-2925).

[0110] Alignment of IPD079 homologs (FIGS. 1 & 2) allows for identification of residues that are highly conserved among homologs in this family.

[0111] Silencing Elements

[0112] Silencing elements are provided which, when ingested by the pest, decrease the expression of one or more of the target sequences and thereby controls the pest (i.e., has insecticidal activity).

[0113] By “silencing element” is intended a polynucleotide which when contacted by or ingested by a plant insect pest, is capable of reducing or eliminating the level or expression of a target polynucleotide or the polypeptide encoded thereby. Accordingly, it is to be understood that “silencing element,” as used herein, comprises polynucleotides such as RNA constructs, double stranded RNA (dsRNA), hairpin RNA, and sense and/or antisense RNA. In one embodiment, the silencing element employed can reduce or eliminate the expression level of the target sequence by influencing the level of the target RNA transcript or, alternatively, by influencing translation and thereby affecting the level of the encoded polypeptide. Methods to assay for functional silencing elements that are capable of reducing or eliminating the level of a sequence of interest are disclosed elsewhere herein. A single polynucleotide employed in the disclosed methods can comprise one or more silencing elements to the same or different target polynucleotides. The silencing element can be produced in vivo (i.e., in a host cell such as a plant or microorganism) or in vitro.

[0114] As used herein, a “target sequence” or “target polynucleotide” comprises any sequence in the pest that one desires to reduce the level of expression thereof. In certain embodiments, decreasing the level of expression of the target sequence in the pest controls the pest. For instance, the target sequence may be essential for growth and development. Non-limiting examples of target sequences include a polynucleotide set forth in SEQ ID NOs: 1279, 1280, 1337, 1338, or 1341, or variants and fragments thereof, and complements thereof. Target fragments include, but are not limited to, SEQ ID NOs: 1281-1336, 1339-1340, and 1343-1376. As exemplified elsewhere herein, decreasing the level of expression of one or more of these target sequences in a Coleopteran plant pest or a Diabrotica plant pest controls the pest. A target sequence, or a target sequence fragment may be used as a template to produce a silencing element, including but not limited to, a double stranded RNA.

[0115] In certain embodiments, a silencing element may comprise a chimeric construction molecule comprising two or more disclosed sequences or portions thereof. For example, the chimeric construction may be a hairpin or dsRNA as disclosed herein. A chimera may comprise two or more disclosed sequences or portions thereof. In one embodiment, a chimera contemplates two complementary sequences set forth herein, or portions thereof, having some degree of mismatch between the complementary sequences such that the two sequences are not perfect complements of one another. Providing at least two different sequences in a single silencing element may allow for targeting multiple genes using one silencing element and/or for example, one expression cassette. Targeting multiple genes may allow for slowing or reducing the possibility of resistance by the pest. In addition, providing multiple targeting ability in one expressed molecule may reduce the expression burden of the transformed plant or plant product, or provide topical treatments that are capable of targeting multiple hosts with one application.

[0116] In certain embodiments, while the silencing element controls pests, preferably the silencing element has no effect on the normal plant or plant part.

[0117] As discussed in further detail below, silencing elements can include, but are not limited to, a sense suppression element, an antisense suppression element, a double stranded RNA, a siRNA, an amiRNA, a miRNA, or a hairpin suppression element. In an embodiment, silencing elements may comprise a chimera where two or more disclosed sequences or active fragments or variants, or complements thereof, are found in the same RNA molecule. In various embodiments, a disclosed sequence or active fragment or variant, or complement thereof, may be present as more than one copy in a DNA construct, silencing element, DNA molecule or RNA molecule. In a hairpin or dsRNA molecule, the location of a sense or antisense sequence in the molecule, for example, in which sequence is transcribed first or is located on a particular terminus of the RNA molecule, is not limiting to the disclosed sequences, and the dsRNA is not to be limited by disclosures herein of a particular location for such a sequence. Non-limiting examples of silencing elements that can be employed to decrease expression of these target sequences comprise fragments or variants of the sense or antisense sequence, or alternatively consists of the sense or antisense sequence, of a sequence set forth in SEQ ID NOs: 1279, 1280, 1337, 1338, or 1341, or variants and fragments thereof, and complements thereof. The silencing element can further comprise additional sequences that advantageously effect transcription and/or the stability of a resulting transcript. For example, the silencing elements can comprise at least one thymine residue at the 3′ end. This can aid in stabilization. Thus, the silencing elements can have at least 1, 2, 3, 4, 5, 6, 7, 8, 9, 10 or more thymine residues at the 3′ end. As discussed in further detail below, enhancer suppressor elements can also be employed in conjunction with the silencing elements disclosed herein.

[0118] By “reduces” or “reducing” the expression level of a polynucleotide or a polypeptide encoded thereby is intended to mean, the polynucleotide or polypeptide level of the target sequence is statistically lower than the polynucleotide level or polypeptide level of the same target sequence in an appropriate control pest which is not exposed to (i.e., has not ingested or come into contact with) the silencing element. In particular embodiments, methods and/or compositions disclosed herein reduce the polynucleotide level and/or the polypeptide level of the target sequence in a plant insect pest to less than 95%, less than 90%, less than 80%, less than 70%, less than 60%, less than 50%, less than 40%, less than 30%, less than 20%, less than 10%, or less than 5% of the polynucleotide level, or the level of the polypeptide encoded thereby, of the same target sequence in an appropriate control pest. In some embodiments, a silencing element has substantial sequence identity to the target polynucleotide, typically greater than about 65% sequence identity, greater than about 85% sequence identity, about 90%, 91%, 92%, 93%, 94%, 95%, 96%, 97%, 98% or 99% sequence identity. Furthermore, a silencing element can be complementary to a portion of the target polynucleotide. Generally, sequences of at least 15, 16, 17, 18, 19, 20, 22, 25, 50, 100, 200, 300, 400, 450 continuous nucleotides or greater of the sequence set forth in any of SEQ ID NOs: 1279, 1280, 1337, 1338, or 1341, or variants and fragments thereof, and complements thereof may be used. Methods to assay for the level of the RNA transcript, the level of the encoded polypeptide, or the activity of the polynucleotide or polypeptide are discussed elsewhere herein.

[0119] i. Sense Suppression Elements

[0120] As used herein, a “sense suppression element” comprises a polynucleotide designed to express an RNA molecule corresponding to at least a part of a target messenger RNA in the “sense” orientation. Expression of the RNA molecule comprising the sense suppression element reduces or eliminates the level of the target polynucleotide or the polypeptide encoded thereby. The polynucleotide comprising the sense suppression element may correspond to all or part of the sequence of the target polynucleotide, all or part of the 5′ and/or 3′ untranslated region of the target polynucleotide, all or part of the coding sequence of the target polynucleotide, or all or part of both the coding sequence and the untranslated regions of the target polynucleotide.

[0121] Typically, a sense suppression element has substantial sequence identity to the target polynucleotide, typically greater than about 65% sequence identity, greater than about 85% sequence identity, about 90%, 91%, 92%, 93%, 94%, 95%, 96%, 97%, 98% or 99% sequence identity. See, U.S. Pat. Nos. 5,283,184 and 5,034,323; herein incorporated by reference. The sense suppression element can be any length so long as it allows for the suppression of the targeted sequence. The sense suppression element can be, for example, 15, 16, 17, 18, 19, 20, 22, 25, 30, 50, 100, 150, 200, 250, 300, 350, 400, 450, 500, 600, 700, 900, 1000, 1100, 1200, 1300 nucleotides or longer of the target polynucleotides set forth in any of SEQ ID NOS.: 1-53 or 107-254, or variants and fragments thereof, and complements thereof. In other embodiments, the sense suppression element can be, for example, about 15-25, 19-35, 19-50, 25-100, 100-150, 150-200, 200-250, 250-300, 300-350, 350-400, 450-500, 500-550, 550-600, 600-650, 650-700, 700-750, 750-800, 800-850, 850-900, 900-950, 950-1000, 1000-1050, 1050-1100, 1100-1200, 1200-1300, 1300-1400, 1400-1500, 1500-1600, 1600-1700, 1700-1800 nucleotides or longer of the target polynucleotides set forth in any of SEQ ID NOs: 1279, 1280, 1337, 1338, or 1341, or variants and fragments thereof, and complements thereof.

[0122] ii. Antisense Suppression Elements

[0123] As used herein, an “antisense suppression element” comprises a polynucleotide which is designed to express an RNA molecule complementary to all or part of a target messenger RNA. Expression of the antisense RNA suppression element reduces or eliminates the level of the target polynucleotide. The polynucleotide for use in antisense suppression may correspond to all or part of the complement of the sequence encoding the target polynucleotide, all or part of the complement of the 5′ and/or 3′ untranslated region of the target polynucleotide, all or part of the complement of the coding sequence of the target polynucleotide, or all or part of the complement of both the coding sequence and the untranslated regions of the target polynucleotide. In addition, the antisense suppression element may be fully complementary (i.e., 100% identical to the complement of the target sequence) or partially complementary (i.e., less than 100% identical to the complement of the target sequence) to the target polynucleotide. In certain embodiments, the antisense suppression element comprises at least 85%, 90%, 91%, 92%, 93%, 94%, 95%, 96%, 97%, 98%, or 99% sequence complementarity to the target polynucleotide. Antisense suppression may be used to inhibit the expression of multiple proteins in the same plant. See, for example, U.S. Pat. No. 5,942,657. Furthermore, the antisense suppression element can be complementary to a portion of the target polynucleotide. Generally, sequences of at least 15, 16, 17, 18, 19, 20, 22, 25, 50, 100, 200, 300, 400, 450 nucleotides or greater of the sequence set forth in any of SEQ ID NOS.: 1-53 or 107-254, or variants and fragments thereof, and complements thereof may be used. Methods for using antisense suppression to inhibit the expression of endogenous genes in plants are described, for example, in Liu et al (2002) Plant Physiol. 129:1732-1743 and U.S. Pat. No. 5,942,657, which is herein incorporated by reference.

[0124] iii. Double Stranded RNA Suppression Element

[0125] A “double stranded RNA silencing element” or “dsRNA,” comprises at least one transcript that is capable of forming a dsRNA either before or after ingestion by a plant insect pest. Thus, a “dsRNA silencing element” includes a dsRNA, a transcript or polyribonucleotide capable of forming a dsRNA or more than one transcript or polyribonucleotide capable of forming a dsRNA. “Double stranded RNA” or “dsRNA” refers to a polyribonucleotide structure formed either by a single self-complementary RNA molecule or a polyribonucleotide structure formed by the expression of at least two distinct RNA strands. The dsRNA molecule(s) employed in the disclosed methods and compositions mediate the reduction of expression of a target sequence, for example, by mediating RNA interference “RNAi” or gene silencing in a sequence-specific manner. In various embodiments, the dsRNA is capable of reducing or eliminating the level or expression of a target polynucleotide or the polypeptide encoded thereby in a plant insect pest.

[0126] The dsRNA can reduce or eliminate the expression level of the target sequence by influencing the level of the target RNA transcript, by influencing translation and thereby affecting the level of the encoded polypeptide, or by influencing expression at the pre-transcriptional level (i.e., via the modulation of chromatin structure, methylation pattern, etc., to alter gene expression). For example, see Verdel et al. (2004) Science 303:672-676; Pal-Bhadra et al. (2004) Science 303:669-672; Allshire (2002) Science 297:1818-1819; Volpe et al. (2002) Science 297:1833-1837; Jenuwein (2002) Science 297:2215-2218; and Hall et al. (2002) Science 297:2232-2237. Methods to assay for functional dsRNA that are capable of reducing or eliminating the level of a sequence of interest are disclosed elsewhere herein. Accordingly, as used herein, the term “dsRNA” is meant to encompass other terms used to describe nucleic acid molecules that are capable of mediating RNA interference or gene silencing, including, for example, short-interfering RNA (siRNA), double-stranded RNA (dsRNA), micro-RNA (miRNA), hairpin RNA, short hairpin RNA (shRNA), post-transcriptional gene silencing RNA (ptgsRNA), and others.

[0127] In certain embodiments, at least one strand of the duplex or double-stranded region of the dsRNA shares sufficient sequence identity or sequence complementarity to the target polynucleotide to allow the dsRNA to reduce the level of expression of the target sequence. In some embodiments, a dsRNA has substantial sequence identity to the target polynucleotide, typically greater than about 65% sequence identity, greater than about 85% sequence identity, about 90%, 91%, 92%, 93%, 94%, 95%, 96%, 97%, 98% or 99% sequence identity. Furthermore, a dsRNA element can be complementary to a portion of the target polynucleotide. Generally, sequences of at least 15, 16, 17, 18, 19, 20, 22, 25, 50, 100, 200, 300, 400, 450 nucleotides or greater of the sequence set forth in any of SEQ ID NOs: 1279, 1280, 1337, 1338, or 1341, or variants and fragments thereof, and complements thereof may be used. As used herein, the strand that is complementary to the target polynucleotide is the “antisense strand” and the strand homologous to the target polynucleotide is the “sense strand.”

[0128] In another embodiment, the dsRNA comprises a hairpin RNA. A hairpin RNA comprises an RNA molecule that is capable of folding back onto itself to form a double stranded structure. Multiple structures can be employed as hairpin elements. In certain embodiments, the dsRNA suppression element comprises a hairpin element which comprises in the following order, a first segment, a second segment, and a third segment, where the first and the third segment share sufficient complementarity to allow the transcribed RNA to form a double-stranded stem-loop structure.

[0129] The “second segment” of the hairpin comprises a “loop” or a “loop region.” These terms are used synonymously herein and are to be construed broadly to comprise any nucleotide sequence that confers enough flexibility to allow self-pairing to occur between complementary regions of a polynucleotide (i.e., segments 1 and 3 which form the stem of the hairpin). For example, in some embodiments, the loop region may be substantially single stranded and act as a spacer between the self-complementary regions of the hairpin stem-loop. In some embodiments, the loop region can comprise a random or nonsense nucleotide sequence and thus not share sequence identity to a target polynucleotide. In other embodiments, the loop region comprises a sense or an antisense RNA sequence or fragment thereof that shares identity to a target polynucleotide. See, for example, International Patent Publication No. WO 02/00904. In certain embodiments, the loop sequence can include an intron sequence, a sequence derived from an intron sequence, a sequence homologous to an intron sequence, or a modified intron sequence. The intron sequence can be one found in the same or a different species from which segments 1 and 3 are derived. In certain embodiments, the loop region can be optimized to be as short as possible while still providing enough intramolecular flexibility to allow the formation of the base-paired stem region. Accordingly, the loop sequence is generally less than 1000, 900, 800, 700, 600, 500, 400, 300, 200, 100, 50, 25, 20, 19, 18, 17, 16, 15, 10 nucleotides or less.

[0130] The “first” and the “third” segment of the hairpin RNA molecule comprise the base-paired stem of the hairpin structure. The first and the third segments are inverted repeats of one another and share sufficient complementarity to allow the formation of the base-paired stem region. In certain embodiments, the first and the third segments are fully complementary to one another. Alternatively, the first and the third segment may be partially complementary to each other so long as they are capable of hybridizing to one another to form a base-paired stem region. The amount of complementarity between the first and the third segment can be calculated as a percentage of the entire segment. Thus, the first and the third segment of the hairpin RNA generally share at least 50%, 60%, 70%, 80%, 85%, 90%, 91%, 92%, 93%, 94%, 95%, 96%, 97%, 98%, 99%, up to and including 100% complementarity.

[0131] The first and the third segment are at least about 1000, 500, 475, 450, 425, 400, 375, 350, 325, 300, 250, 225, 200, 175, 150, 125, 100, 75, 60, 50, 40, 30, 25, 22, 20, 19, 18, 17, 16, 15 or 10 nucleotides in length. In certain embodiments, the length of the first and/or the third segment is about 10-100 nucleotides, about 10 to about 75 nucleotides, about 10 to about 50 nucleotides, about 10 to about 40 nucleotides, about 10 to about 35 nucleotides, about 10 to about 30 nucleotides, about 10 to about 25 nucleotides, about 10 to about 19 nucleotides, about 10 to about 20 nucleotides, about 19 to about 50 nucleotides, about 50 nucleotides to about 100 nucleotides, about 100 nucleotides to about 150 nucleotides, about 100 nucleotides to about 300 nucleotides, about 150 nucleotides to about 200 nucleotides, about 200 nucleotides to about 250 nucleotides, about 250 nucleotides to about 300 nucleotides, about 300 nucleotides to about 350 nucleotides, about 350 nucleotides to about 400 nucleotides, about 400 nucleotide to about 500 nucleotides, about 600 nt, about 700 nt, about 800 nt, about 900 nt, about 1000 nt, about 1100 nt, about 1200 nt, 1300 nt, 1400 nt, 1500 nt, 1600 nt, 1700 nt, 1800 nt, 1900 nt, 2000 nt or longer. In other embodiments, the length of the first and/or the third segment comprises at least 10-19 nucleotides, 10-20 nucleotides; 19-35 nucleotides, 20-35 nucleotides; 30-45 nucleotides; 40-50 nucleotides; 50-100 nucleotides; 100-300 nucleotides; about 500-700 nucleotides; about 700-900 nucleotides; about 900-1100 nucleotides; about 1300-1500 nucleotides; about 1500-1700 nucleotides; about 1700-1900 nucleotides; about 1900-2100 nucleotides; about 2100-2300 nucleotides; or about 2300-2500 nucleotides. See, for example, International Publication No. WO 02/00904.

[0132] The disclosed hairpin molecules or double-stranded RNA molecules may have more than one disclosed sequence or active fragments or variants, or complements thereof, found in the same portion of the RNA molecule. For example, in a chimeric hairpin structure, the first segment of a hairpin molecule comprises two polynucleotide sections, each with a different disclosed sequence. For example, reading from one terminus of the hairpin, the first segment is composed of sequences from two separate genes (A followed by B). This first segment is followed by the second segment, the loop portion of the hairpin. The loop segment is followed by the third segment, where the complementary strands of the sequences in the first segment are found (B* followed by A*) in forming the stem-loop, hairpin structure, the stem contains SeqA-A* at the distal end of the stem and SeqB-B* proximal to the loop region.

[0133] In certain embodiments, the first and the third segment comprise at least 20 nucleotides having at least 85% complementary to the first segment. In still other embodiments, the first and the third segments which form the stem-loop structure of the hairpin comprise 3′ or 5′ overhang regions having unpaired nucleotide residues.

[0134] In certain embodiments, the sequences used in the first, the second, and/or the third segments comprise domains that are designed to have sufficient sequence identity to a target polynucleotide of interest and thereby have the ability to decrease the level of expression of the target polynucleotide. The specificity of the inhibitory RNA transcripts is therefore generally conferred by these domains of the silencing element. Thus, in some embodiments, the first, second and/or third segment of the silencing element comprise a domain having at least 10, at least 15, at least 19, at least 20, at least 21, at least 22, at least 23, at least 24, at least 25, at least 30, at least 40, at least 50, at least 100, at least 200, at least 300, at least 500, at least 1000, or more than 1000 nucleotides that share sufficient sequence identity to the target polynucleotide to allow for a decrease in expression levels of the target polynucleotide when expressed in an appropriate cell. In other embodiments, the domain is between about 15 to 50 nucleotides, about 19-35 nucleotides, about 20-35 nucleotides, about 25-50 nucleotides, about 19 to 75 nucleotides, about 20 to 75 nucleotides, about 40-90 nucleotides about 15-100 nucleotides, 10-100 nucleotides, about 10 to about 75 nucleotides, about 10 to about 50 nucleotides, about 10 to about 40 nucleotides, about 10 to about 35 nucleotides, about 10 to about 30 nucleotides, about 10 to about 25 nucleotides, about 10 to about 20 nucleotides, about 10 to about 19 nucleotides, about 50 nucleotides to about 100 nucleotides, about 100 nucleotides to about 150 nucleotides, about 150 nucleotides to about 200 nucleotides, about 200 nucleotides to about 250 nucleotides, about 250 nucleotides to about 300 nucleotides, about 300 nucleotides to about 350 nucleotides, about 350 nucleotides to about 400 nucleotides, about 400 nucleotide to about 500 nucleotides or longer. In other embodiments, the length of the first and/or the third segment comprises at least 10-20 nucleotides, at least 10-19 nucleotides, 20-35 nucleotides, 30-45 nucleotides, 40-50 nucleotides, 50-100 nucleotides, or about 100-300 nucleotides.

[0135] In certain embodiments, a domain of the first, the second, and/or the third segment has 100% sequence identity to the target polynucleotide. In other embodiments, the domain of the first, the second and/or the third segment having homology to the target polynucleotide have at least 50%, 60%, 70%, 80%, 85%, 90%, 91%, 92%, 93%, 94%, 95%, 96%, 97%, 98%, 99%, or greater sequence identity to a region of the target polynucleotide. The sequence identity of the domains of the first, the second and/or the third segments complementary to a target polynucleotide need only be sufficient to decrease expression of the target polynucleotide of interest. See, for example, Chuang and Meyerowitz (2000) Proc. Natl. Acad. Sci. USA 97:4985-4990; Stoutjesdijk et al. (2002) Plant Physiol. 129:1723-1731; Waterhouse and Helliwell (2003) Nat. Rev. Genet. 4:29-38; Pandolfini et al. BMC Biotechnology 3:7, and U.S. Patent Publication No. 20030175965; each of which is herein incorporated by reference. A transient assay for the efficiency of hpRNA constructs to silence gene expression in vivo has been described by Panstruga et al. (2003) Mol. Biol. Rep. 30:135-140.

[0136] The amount of complementarity shared between the first, second, and/or third segment and the target polynucleotide or the amount of complementarity shared between the first segment and the third segment (i.e., the stem of the hairpin structure) may vary depending on the organism in which gene expression is to be controlled. Some organisms or cell types may require exact pairing or 100% identity, while other organisms or cell types may tolerate some mismatching. In some cells, for example, a single nucleotide mismatch in the targeting sequence abrogates the ability to suppress gene expression. In these cells, the disclosed suppression cassettes can be used to target the suppression of mutant genes, for example, oncogenes whose transcripts comprise point mutations and therefore they can be specifically targeted using the methods and compositions disclosed herein without altering the expression of the remaining wild-type allele. In other organisms, holistic sequence variability may be tolerated as long as some 22 nt region of the sequence is represented in 100% homology between target polynucleotide and the suppression cassette.

[0137] Any region of the target polynucleotide can be used to design a domain of the silencing element that shares sufficient sequence identity to allow expression of the hairpin transcript to decrease the level of the target polynucleotide. For instance, a domain may be designed to share sequence identity to the 5′ untranslated region of the target polynucleotide(s), the 3′ untranslated region of the target polynucleotide(s), exonic regions of the target polynucleotide(s), intronic regions of the target polynucleotide(s), and any combination thereof. In certain embodiments, a domain of the silencing element shares sufficient identity, homology, or is complementary to at least about 15, 16, 17, 18, 19, 20, 22, 25 or 30 consecutive nucleotides from about nucleotides 1-50, 25-75, 75-125, 50-100, 125-175, 175-225, 100-150, 150-200, 200-250, 225-275, 275-325, 250-300, 325-375, 375-425, 300-350, 350-400, 425-475, 400-450, 475-525, 450-500, 525-575, 575-625, 550-600, 625-675, 675-725, 600-650, 625-675, 675-725, 650-700, 725-825, 825-875, 750-800, 875-925, 925-975, 850-900, 925-975, 975-1025, 950-1000, 1000-1050, 1025-1075, 1075-1125, 1050-1100, 1125-1175, 1100-1200, 1175-1225, 1225-1275, 1200-1300, 1325-1375, 1375-1425, 1300-1400, 1425-1475, 1475-1525, 1400-1500, 1525-1575, 1575-1625, 1625-1675, 1675-1725, 1725-1775, 1775-1825, 1825-1875, 1875-1925, 1925-1975, 1975-2025, 2025-2075, 2075-2125, 2125-2175, 2175-2225, 1500-1600, 1600-1700, 1700-1800, 1800-1900, 1900-2000 of the target sequence. In some instances to optimize the siRNA sequences employed in the hairpin, the synthetic oligodeoxyribonucleotide/RNAse H method can be used to determine sites on the target mRNA that are in a conformation that is susceptible to RNA silencing. See, for example, Vickers et al. (2003) J. Biol. Chem 278:7108-7118 and Yang et al. (2002) Proc. Natl. Acad. Sci. USA 99:9442-9447, herein incorporated by reference. These studies indicate that there is a significant correlation between the RNase-H-sensitive sites and sites that promote efficient siRNA-directed mRNA degradation.

[0138] The hairpin silencing element may also be designed such that the sense sequence or the antisense sequence do not correspond to a target polynucleotide. In this embodiment, the sense and antisense sequence flank a loop sequence that comprises a nucleotide sequence corresponding to all or part of the target polynucleotide. Thus, it is the loop region that determines the specificity of the RNA interference. See, for example, WO 02/00904.

[0139] In addition, transcriptional gene silencing (TGS) may be accomplished through use of a hairpin suppression element where the inverted repeat of the hairpin shares sequence identity with the promoter region of a target polynucleotide to be silenced. See, for example, Aufsatz et al. (2002) PNAS 99 (Suppl. 4):16499-16506 and Mette et al. (2000) EMBO J 19(19):5194-5201.

[0140] In other embodiments, the silencing element can comprise a small RNA (sRNA). sRNAs can comprise both micro RNA (miRNA) and short-interfering RNA (siRNA) (Meister and Tuschl (2004) Nature 431:343-349 and Bonetta et al. (2004) Nature Methods 1:79-86). miRNAs are regulatory agents comprising about 19 to about 24 ribonucleotides in length which are highly efficient at inhibiting the expression of target polynucleotides. See, for example Javier et al. (2003) Nature 425: 257-263. For miRNA interference, the silencing element can be designed to express a dsRNA molecule that forms a hairpin structure or partially base-paired structure containing a 19, 20, 21, 22, 23, 24 or 25 nucleotide sequence that is complementary to the target polynucleotide of interest. The miRNA can be synthetically made, or transcribed as a longer RNA which is subsequently cleaved to produce the active miRNA. Specifically, the miRNA can comprise 19 nucleotides of the sequence having homology to a target polynucleotide in sense orientation and 19 nucleotides of a corresponding antisense sequence that is complementary to the sense sequence. The miRNA can be an “artificial miRNA” or “amiRNA” which comprises a miRNA sequence that is synthetically designed to silence a target sequence.

[0141] When expressing an miRNA the final (mature) miRNA is present in a duplex in a precursor backbone structure, the two strands being referred to as the miRNA (the strand that will eventually base pair with the target) and miRNA*(star sequence). It has been demonstrated that miRNAs can be transgenically expressed and target genes of interest for efficient silencing (Highly specific gene silencing by artificial microRNAs in Arabidopsis Schwab R, Ossowski S, Riester M, Warthmann N, Weigel D. Plant Cell. 2006 May; 18(5):1121-33. Epub 2006 Mar. 10; and Expression of artificial microRNAs in transgenic Arabidopsis thaliana confers virus resistance. Niu Q W, Lin S S, Reyes J L, Chen K C, Wu H W, Yeh S D, Chua N H. Nat Biotechnol. 2006 November; 24(11):1420-8. Epub 2006 Oct. 22. Erratum in: Nat Biotechnol. 2007 February; 25(2):254.).

[0142] The silencing element for miRNA interference comprises a miRNA primary sequence. The miRNA primary sequence comprises a DNA sequence having the miRNA and star sequences separated by a loop as well as additional sequences flanking this region that are important for processing. When expressed as an RNA, the structure of the primary miRNA is such as to allow for the formation of a hairpin RNA structure that can be processed into a mature miRNA. In some embodiments, the miRNA backbone comprises a genomic or cDNA miRNA precursor sequence, wherein said sequence comprises a native primary in which a heterologous (artificial) mature miRNA and star sequence are inserted.

[0143] As used herein, a “star sequence” is the sequence within a miRNA precursor backbone that is complementary to the miRNA and forms a duplex with the miRNA to form the stem structure of a hairpin RNA. In some embodiments, the star sequence can comprise less than 100% complementarity to the miRNA sequence. Alternatively, the star sequence can comprise at least 99%, 98%, 97%, 96%, 95%, 90%, 85%, 80% or lower sequence complementarity to the miRNA sequence as long as the star sequence has sufficient complementarity to the miRNA sequence to form a double stranded structure. In still further embodiments, the star sequence comprises a sequence having 1, 2, 3, 4, 5 or more mismatches with the miRNA sequence and still has sufficient complementarity to form a double stranded structure with the miRNA sequence resulting in production of miRNA and suppression of the target sequence.

[0144] The miRNA precursor backbones can be from any plant. In some embodiments, the miRNA precursor backbone is from a monocot. In other embodiments, the miRNA precursor backbone is from a dicot. In further embodiments, the backbone is from maize or soybean. MicroRNA precursor backbones have been described previously. For example, US20090155910A1 (WO 2009/079532) discloses the following soybean miRNA precursor backbones: 156c, 159, 166b, 168c, 396b and 398b, and US20090155909A1 (WO 2009/079548) discloses the following maize miRNA precursor backbones: 159c, 164h, 168a, 169r, and 396h.

[0145] Thus, the primary miRNA can be altered to allow for efficient insertion of heterologous miRNA and star sequences within the miRNA precursor backbone. In such instances, the miRNA segment and the star segment of the miRNA precursor backbone are replaced with the heterologous miRNA and the heterologous star sequences, designed to target any sequence of interest, using a PCR technique and cloned into an expression construct. It is recognized that there could be alterations to the position at which the artificial miRNA and star sequences are inserted into the backbone. Detailed methods for inserting the miRNA and star sequence into the miRNA precursor backbone are described in, for example, US Patent Applications 20090155909A1 and US20090155910A1.

[0146] When designing a miRNA sequence and star sequence, various design choices can be made. See, for example, Schwab R, et al. (2005) Dev Cell 8: 517-27. In non-limiting embodiments, the miRNA sequences disclosed herein can have a “U” at the 5′-end, a “C” or “G” at the 19th nucleotide position, and an “A” or “U” at the 10th nucleotide position. In other embodiments, the miRNA design is such that the miRNA have a high free delta-G as calculated using the ZipFold algorithm (Markham, N. R. & Zuker, M. (2005) Nucleic Acids Res. 33: W577-W581.) Optionally, a one base pair change can be added within the 5′ portion of the miRNA so that the sequence differs from the target sequence by one nucleotide.

[0147] The methods and compositions disclosed herein employ DNA constructs that when transcribed “form” a silencing element, such as a dsRNA molecule. The methods and compositions also may comprise a host cell comprising the DNA construct encoding a silencing element. In another embodiment, The methods and compositions also may comprise a transgenic plant comprising the DNA construct encoding a silencing element. Accordingly, the heterologous polynucleotide being expressed need not form the dsRNA by itself, but can interact with other sequences in the plant cell or in the pest gut after ingestion to allow the formation of the dsRNA. For example, a chimeric polynucleotide that can selectively silence the target polynucleotide can be generated by expressing a chimeric construct comprising the target sequence for a miRNA or siRNA to a sequence corresponding to all or part of the gene or genes to be silenced. In this embodiment, the dsRNA is “formed” when the target for the miRNA or siRNA interacts with the miRNA present in the cell. The resulting dsRNA can then reduce the level of expression of the gene or genes to be silenced. See, for example, US Application Publication 2007-0130653, entitled “Methods and Compositions for Gene Silencing”. The construct can be designed to have a target for an endogenous miRNA or alternatively, a target for a heterologous and/or synthetic miRNA can be employed in the construct. If a heterologous and/or synthetic miRNA is employed, it can be introduced into the cell on the same nucleotide construct as the chimeric polynucleotide or on a separate construct. As discussed elsewhere herein, any method can be used to introduce the construct comprising the heterologous miRNA.

[0148] As used herein, by “controlling a pest” or “controls a pest” is intended any affect on a pest that results in limiting the damage that the pest causes. Controlling a pest includes, but is not limited to, killing the pest, inhibiting development of the pest, altering fertility or growth of the pest in such a manner that the pest provides less damage to the plant, decreasing the number of offspring produced, producing less fit pests, producing pests more susceptible to predator attack, or deterring the pests from eating the plant.

[0149] Reducing the level of expression of the target polynucleotide or the polypeptide encoded thereby, in the pest results in the suppression, control, and/or killing the invading pathogenic organism. Reducing the level of expression of the target sequence of the pest will reduce the disease symptoms resulting from pathogen challenge by at least about 2% to at least about 6%, at least about 5% to about 50%, at least about 10% to about 60%, at least about 30% to about 70%, at least about 40% to about 80%, or at least about 50% to about 90% or greater. Hence, the methods of the invention can be utilized to control pests, particularly, Coleopteran plant pest or a Diabrotica plant pest.

[0150] Assays that measure the control of a pest are commonly known in the art, as are methods to quantitate disease resistance in plants following pathogen infection. See, for example, U.S. Pat. No. 5,614,395, herein incorporated by reference. Such techniques include, measuring over time, the average lesion diameter, the pathogen biomass, and the overall percentage of decayed plant tissues. See, for example, Thomma et al. (1998) Plant Biology 95:15107-15111, herein incorporated by reference. See, also Baum et al. (2007) Nature Biotech 11:1322-1326 and WO 2007/035650 which proved both whole plant feeding assays and corn root feeding assays. Both of these references are herein incorporated by reference in their entirety.

[0151] Compositions

[0152] Compositions comprising a silencing element and a plant derived perforin of the disclosure, including but limited to an IPD079 polypeptide of the disclosure, are also embraced. In some embodiments the composition comprises an IPD079 polypeptide of SEQ ID NO: 2, SEQ ID NO: 4, SEQ ID NO: 6, SEQ ID NO: 8, SEQ ID NO: 10, SEQ ID NO: 12, SEQ ID NO: 14, SEQ ID NO: 16, SEQ ID NO: 18, SEQ ID NO: 20, SEQ ID NO: 22, SEQ ID NO: 24, SEQ ID NO: 26, SEQ ID NO: 28, SEQ ID NO: 30, SEQ ID NO: 32, SEQ ID NO: 34, SEQ ID NO: 36, SEQ ID NO: 38, SEQ ID NO: 40, SEQ ID NO: 42, SEQ ID NO: 44, SEQ ID NO: 46, SEQ ID NO: 48, SEQ ID NO: 50, SEQ ID NO: 52, SEQ ID NO: 54, SEQ ID NO: 72, SEQ ID NO: 74, SEQ ID NO: 76, SEQ ID NO: 78, SEQ ID NO: 80, SEQ ID NO: 82, SEQ ID NO: 84, SEQ ID NO: 86, SEQ ID NO: 88, SEQ ID NO: 90, SEQ ID NO: 92, SEQ ID NO: 94, SEQ ID NO: 56, SEQ ID NO: 58, SEQ ID NO: 60, SEQ ID NO: 62, SEQ ID NO: 64, SEQ ID NO: 66, SEQ ID NO: 68, SEQ ID NO: 70, SEQ ID NO: 96, SEQ ID NO: 98, SEQ ID NO: 100, SEQ ID NO: 102, SEQ ID NO: 104, SEQ ID NO: 106, SEQ ID NO: 108, SEQ ID NO: 110, SEQ ID NO: 112, SEQ ID NO: 114, SEQ ID NO: 116, SEQ ID NO: 118, SEQ ID NO: 120, SEQ ID NO: 122, SEQ ID NO: 124, SEQ ID NO: 126, SEQ ID NO: 128, SEQ ID NO: 130, SEQ ID NO: 132, SEQ ID NO: 134, SEQ ID NO: 136, SEQ ID NO: 138, or SEQ ID NO: 140. In some embodiments the composition comprises an IPD079 fusion protein. In some compositions, the composition comprises a silencing element targeting SEQ ID NOs: 1279, 1280, 1337, 1338, or 1341.

[0153] In certain embodiments, the composition comprises a plant perforin or an IPD079 polypeptide disclosed herein and a polynucleotide encoding one or more silencing elements. In some embodiments, the silencing element(s) targets a RyanR, a Pat 3, an HP2, an RPS10, an Snf7, a V-ATPase, a Coatamer subunit alpha, a Coatamer subunit beta, a MAEL, a BOULE, or a NCLB gene, including any one of the polynucleotides set forth in SEQ ID NOs: 1279-1376.

[0154] One or more of the polynucleotides comprising the silencing element can be provided as an external composition such as a spray or powder to the plant, plant part, seed, a plant insect pest, or an area of cultivation. It is recognized that the composition can comprise a cell (such as plant cell or a bacterial cell), in which a polynucleotide encoding a IPD079 polypeptide and a silencing element is stably incorporated into the genome and operably linked to promoters active in the cell. In other embodiments, compositions comprising the IPD079 polypeptide and a silencing element are not contained in a cell. In such embodiments, the composition can be applied to an area inhabited by a plant insect pest. In one embodiment, the composition is applied externally to a plant (i.e., by spraying a field or area of cultivation) to protect the plant from the pest. Methods of applying nucleotides in such a manner are known to those of skill in the art.

[0155] The composition of the invention can further be formulated as bait. In this embodiment, the compositions comprise a food substance or an attractant which enhances the attractiveness of the composition to the pest.

[0156] The composition comprising a IPD079 polypeptide and a silencing element can be formulated in an agriculturally suitable and/or environmentally acceptable carrier. Such carriers can be any material that the animal, plant or environment to be treated can tolerate. Furthermore, the carrier must be such that the composition remains effective at controlling a plant insect pest. Examples of such carriers include water, saline, Ringer's solution, dextrose or other sugar solutions, Hank's solution, and other aqueous physiologically balanced salt solutions, phosphate buffer, bicarbonate buffer and Tris buffer. In addition, the composition may include compounds that increase the half-life of a composition. Various insecticidal formulations can also be found in, for example, US Patent Application Publication Numbers 2008/0275115, 2008/0242174, 2008/0027143, 2005/0042245, and 2004/0127520.

[0157] Nucleotide Constructs, Expression Cassettes and Vectors

[0158] The use of the term “nucleotide constructs” herein is not intended to limit the embodiments to nucleotide constructs comprising DNA. Those of ordinary skill in the art will recognize that nucleotide constructs particularly polynucleotides and oligonucleotides composed of ribonucleotides and combinations of ribonucleotides and deoxyribonucleotides may also be employed in the methods disclosed herein. The nucleotide constructs, nucleic acids, and nucleotide sequences of the embodiments additionally encompass all complementary forms of such constructs, molecules, and sequences. Further, the nucleotide constructs, nucleotide molecules, and nucleotide sequences of the embodiments encompass all nucleotide constructs, molecules, and sequences which can be employed in the methods of the embodiments for transforming plants including, but not limited to, those comprised of deoxyribonucleotides, ribonucleotides, and combinations thereof. Such deoxyribonucleotides and ribonucleotides include both naturally occurring molecules and synthetic analogues. The nucleotide constructs, nucleic acids, and nucleotide sequences of the embodiments also encompass all forms of nucleotide constructs including, but not limited to, single-stranded forms, double-stranded forms, hairpins, stem-and-loop structures and the like.

[0159] A further embodiment relates to a transformed organism such as an organism selected from plant and insect cells, bacteria, yeast, baculovirus, protozoa, nematodes and algae. The transformed organism comprises a DNA molecule of the embodiments, an expression cassette comprising the DNA molecule or a vector comprising the expression cassette, which may be stably incorporated into the genome of the transformed organism.

[0160] The sequences of the embodiments are provided in DNA constructs for expression in the organism of interest. The construct will include 5′ and 3′ regulatory sequences operably linked to a sequence of the embodiments. The term “operably linked” as used herein refers to a functional linkage between a promoter and a second sequence, wherein the promoter sequence initiates and mediates transcription of the DNA sequence corresponding to the second sequence. The construct may additionally contain at least one additional gene to be cotransformed into the organism. Alternatively, the additional gene(s) can be provided on multiple DNA constructs.

[0161] The DNA construct will generally include in the 5′ to 3′ direction of transcription: a transcriptional and translational initiation region (i.e., a promoter), a DNA sequence of the embodiments, and a transcriptional and translational termination region (i.e., termination region) functional in the organism serving as a host. The transcriptional initiation region (i.e., the promoter) may be native, analogous, foreign or heterologous to the host organism and/or to the sequence of the embodiments. Additionally, the promoter may be the natural sequence or alternatively a synthetic sequence. The term “foreign” as used herein indicates that the promoter is not found in the native organism into which the promoter is introduced. Where the promoter is “foreign” or “heterologous” to the sequence of the embodiments, it is intended that the promoter is not the native or naturally occurring promoter for the operably linked sequence of the embodiments. As used herein, a chimeric gene comprises a coding sequence operably linked to a transcription initiation region that is heterologous to the coding sequence. Where the promoter is a native or natural sequence, the expression of the operably linked sequence is altered from the wild-type expression, which results in an alteration in phenotype.

[0162] The polynucleotide encoding the silencing element or in specific embodiments employed in the disclosed methods and compositions may be provided in expression cassettes for expression in a plant or organism of interest. It is recognized that multiple silencing elements including multiple identical silencing elements, multiple silencing elements targeting different regions of the target sequence, or multiple silencing elements from different target sequences can be used. In this embodiment, it is recognized that each silencing element and IPD079 polypeptide combination may be contained in a single or separate cassette, DNA construct, or vector. As discussed, any means of providing the silencing element is contemplated.

[0163] In other embodiment, a silencing element disclosed herein is expressed from a suppression cassette. Such a cassette can comprise two convergent promoters that drive transcription of an operably linked silencing element. “Convergent promoters” refers to promoters that are oriented on either terminus of the operably linked silencing element such that each promoter drives transcription of the silencing element in opposite directions, yielding two transcripts. In such embodiments, the convergent promoters allow for the transcription of the sense and anti-sense strand and thus allow for the formation of a dsRNA. Such a cassette may also comprise two divergent promoters that drive transcription of one or more operably linked silencing elements. “Divergent promoters” refers to promoters that are oriented in opposite directions of each other, driving transcription of the one or more silencing elements in opposite directions. In such embodiments, the divergent promoters allow for the transcription of the sense and antisense strands and allow for the formation of a dsRNA. In such embodiments, the divergent promoters also allow for the transcription of at least two separate hairpin RNAs. In another embodiment, one cassette comprising two or more silencing elements under the control of two separate promoters in the same orientation is present in a construct. In another embodiment, two or more individual cassettes, each comprising at least one silencing element under the control of a promoter, are present in a construct in the same orientation.

[0164] In some embodiments the DNA construct may also include a transcriptional enhancer sequence. As used herein, the term an “enhancer” refers to a DNA sequence which can stimulate promoter activity, and may be an innate element of the promoter or a heterologous element inserted to enhance the level or tissue-specificity of a promoter. Various enhancers are known in the art including for example, introns with gene expression enhancing properties in plants (US Patent Application Publication Number 2009/0144863, the ubiquitin intron (i.e., the maize ubiquitin intron 1 (see, for example, NCBI sequence S94464)), the omega enhancer or the omega prime enhancer (Gallie, et al., (1989) Molecular Biology of RNA ed. Cech (Liss, New York) 237-256 and Gallie, et al., (1987) Gene 60:217-25), the CaMV 35S enhancer (see, e.g., Benfey, et al., (1990) EMBO J. 9:1685-96) and the enhancers of U.S. Pat. No. 7,803,992 may also be used, each of which is incorporated by reference. The above list of transcriptional enhancers is not meant to be limiting. Any appropriate transcriptional enhancer can be used in the embodiments.

[0165] The termination region may be native with the transcriptional initiation region, may be native with the operably linked DNA sequence of interest, may be native with the plant host or may be derived from another source (i.e., foreign or heterologous to the promoter, the sequence of interest, the plant host or any combination thereof).

[0166] Convenient termination regions are available from the Ti-plasmid of A. tumefaciens, such as the octopine synthase and nopaline synthase termination regions. See also, Guerineau, et al., (1991) Mol. Gen. Genet. 262:141-144; Proudfoot, (1991) Cell 64:671-674; Sanfacon, et al., (1991) Genes Dev. 5:141-149; Mogen, et al., (1990) Plant Cell 2:1261-1272; Munroe, et al., (1990) Gene 91:151-158; Ballas, et al., (1989) Nucleic Acids Res. 17:7891-7903 and Joshi, et al., (1987) Nucleic Acid Res. 15:9627-9639.

[0167] Where appropriate, a nucleic acid may be optimized for increased expression in the host organism. Thus, where the host organism is a plant, the synthetic nucleic acids can be synthesized using plant-preferred codons for improved expression. See, for example, Campbell and Gowri, (1990) Plant Physiol. 92:1-11 for a discussion of host-preferred codon usage. Methods are available in the art for synthesizing plant-preferred genes.

[0168] A Glycine max codon usage table can be found at kazusa.orjp/codon/cgi-bin/showcodon.cgi?species=3847&aa=1&style=N, which can be accessed using the www prefix.

[0169] In some embodiments the recombinant nucleic acid molecule encoding an IPD079 polypeptide has maize optimized codons.

[0170] Additional sequence modifications are known to enhance gene expression in a cellular host. These include elimination of sequences encoding spurious polyadenylation signals, exon-intron splice site signals, transposon-like repeats, and other well-characterized sequences that may be deleterious to gene expression. The GC content of the sequence may be adjusted to levels average for a given cellular host, as calculated by reference to known genes expressed in the host cell. The term “host cell” as used herein refers to a cell which contains a vector and supports the replication and/or expression of the expression vector is intended. Host cells may be prokaryotic cells such as E. coli or eukaryotic cells such as yeast, insect, amphibian or mammalian cells or monocotyledonous or dicotyledonous plant cells. An example of a monocotyledonous host cell is a maize host cell. When possible, the sequence is modified to avoid predicted hairpin secondary mRNA structures.

[0171] The expression cassettes may additionally contain 5′ leader sequences. Such leader sequences can act to enhance translation. Translation leaders are known in the art and include: picornavirus leaders, for example, EMCV leader (Encephalomyocarditis 5′ noncoding region) (Elroy-Stein, et al., (1989) Proc. Natl. Acad. Sci. USA 86:6126-6130); potyvirus leaders, for example, TEV leader (Tobacco Etch Virus) (Gallie, et al., (1995) Gene 165(2):233-238), MDMV leader (Maize Dwarf Mosaic Virus), human immunoglobulin heavy-chain binding protein (BiP) (Macejak, et al., (1991) Nature 353:90-94); untranslated leader from the coat protein mRNA of alfalfa mosaic virus (AMV RNA 4) (Jobling, et al., (1987) Nature 325:622-625); tobacco mosaic virus leader (TMV) (Gallie, et al., (1989) in Molecular Biology of RNA, ed. Cech (Liss, New York), pp. 237-256) and maize chlorotic mottle virus leader (MCMV) (Lommel, et al., (1991) Virology 81:382-385). See also, Della-Cioppa, et al., (1987) Plant Physiol. 84:965-968. Such constructs may also contain a “signal sequence” or “leader sequence” to facilitate co-translational or post-translational transport of the peptide to certain intracellular structures such as the chloroplast (or other plastid), endoplasmic reticulum or Golgi apparatus.

[0172] “Signal sequence” as used herein refers to a sequence that is known or suspected to result in cotranslational or post-translational peptide transport across the cell membrane. In eukaryotes, this typically involves secretion into the Golgi apparatus, with some resulting glycosylation. Insecticidal toxins of bacteria are often synthesized as protoxins, which are proteolytically activated in the gut of the target pest (Chang, (1987) Methods Enzymol. 153:507-516). In some embodiments, the signal sequence is located in the native sequence or may be derived from a sequence of the embodiments. “Leader sequence” as used herein refers to any sequence that when translated, results in an amino acid sequence sufficient to trigger co-translational transport of the peptide chain to a subcellular organelle. Thus, this includes leader sequences targeting transport and/or glycosylation by passage into the endoplasmic reticulum, passage to vacuoles, plastids including chloroplasts, mitochondria, and the like. Nuclear-encoded proteins targeted to the chloroplast thylakoid lumen compartment have a characteristic bipartite transit peptide, composed of a stromal targeting signal peptide and a lumen targeting signal peptide. The stromal targeting information is in the amino-proximal portion of the transit peptide. The lumen targeting signal peptide is in the carboxyl-proximal portion of the transit peptide, and contains all the information for targeting to the lumen. Recent research in proteomics of the higher plant chloroplast has achieved in the identification of numerous nuclear-encoded lumen proteins (Kieselbach et al. FEBS LETT 480:271-276, 2000; Peltier et al. Plant Cell 12:319-341, 2000; Bricker et al. Biochim. Biophys Acta 1503:350-356, 2001), the lumen targeting signal peptide of which can potentially be used in accordance with the present disclosure. About 80 proteins from Arabidopsis, as well as homologous proteins from spinach and garden pea, are reported by Kieselbach et al., Photosynthesis Research, 78:249-264, 2003. In particular, Table 2 of this publication, which is incorporated into the description herewith by reference, discloses 85 proteins from the chloroplast lumen, identified by their accession number (see also US Patent Application Publication 2009/09044298). In addition, the recently published draft version of the rice genome (Goff et al, Science 296:92-100, 2002) is a suitable source for lumen targeting signal peptide which may be used in accordance with the present disclosure.

[0173] Suitable chloroplast transit peptides (CTP) are well known to one skilled in the art also include chimeric CTPs comprising but not limited to, an N-terminal domain, a central domain or a C-terminal domain from a CTP from Oryza sativa 1-deoxy-D xyulose-5-Phosphate Synthase Oryza sativa-Superoxide dismutase Oryza sativa-soluble starch synthase Oryza sativa-NADP-dependent Malic acid enzyme Oryza sativa-Phospho-2-dehydro-3-deoxyheptonate Aldolase 2 Oryza sativa-L-Ascorbate peroxidase 5 Oryza sativa-Phosphoglucan water dikinase, Zea Mays ssRUBISCO, Zea Mays-beta-glucosidase, Zea Mays-Malate dehydrogenase, Zea Mays Thioredoxin M-type US Patent Application Publication 2012/0304336).

[0174] The IPD079 polypeptide gene to be targeted to the chloroplast may be optimized for expression in the chloroplast to account for differences in codon usage between the plant nucleus and this organelle. In this manner, the nucleic acids of interest may be synthesized using chloroplast-preferred codons.

[0175] In preparing the expression cassette, the various DNA fragments may be manipulated so as to provide for the DNA sequences in the proper orientation and, as appropriate, in the proper reading frame. Toward this end, adapters or linkers may be employed to join the DNA fragments or other manipulations may be involved to provide for convenient restriction sites, removal of superfluous DNA, removal of restriction sites or the like. For this purpose, in vitro mutagenesis, primer repair, restriction, annealing, resubstitutions, e.g., transitions and transversions, may be involved.

[0176] A number of promoters can be used in the practice of the embodiments. The promoters can be selected based on the desired outcome. The nucleic acids can be combined with constitutive, tissue-preferred, inducible or other promoters for expression in the host organism. Suitable constitutive promoters for use in a plant host cell include, for example, the core promoter of the Rsyn7 promoter and other constitutive promoters disclosed in WO 1999/43838 and U.S. Pat. No. 6,072,050; the core CaMV 35S promoter (Odell, et al., (1985) Nature 313:810-812); rice actin (McElroy, et al., (1990) Plant Cell 2:163-171); ubiquitin (Christensen, et al., (1989) Plant Mol. Biol. 12:619-632 and Christensen, et al., (1992) Plant Mol. Biol. 18:675-689); pEMU (Last, et al., (1991) Theor. Appl. Genet. 81:581-588); MAS (Velten, et al., (1984) EMBO J. 3:2723-2730); ALS promoter (U.S. Pat. No. 5,659,026) and the like. Other constitutive promoters include, for example, those discussed in U.S. Pat. Nos. 5,608,149; 5,608,144; 5,604,121; 5,569,597; 5,466,785; 5,399,680; 5,268,463; 5,608,142 and 6,177,611.

[0177] Depending on the desired outcome, it may be beneficial to express the gene from an inducible promoter. Of particular interest for regulating the expression of the nucleotide sequences of the embodiments in plants are wound-inducible promoters. Such wound-inducible promoters, may respond to damage caused by insect feeding, and include potato proteinase inhibitor (pin II) gene (Ryan, (1990) Ann. Rev. Phytopath. 28:425-449; Duan, et al., (1996) Nature Biotechnology 14:494-498); wun1 and wun2, U.S. Pat. No. 5,428,148; win1 and win2 (Stanford, et al., (1989) Mol. Gen. Genet. 215:200-208); systemin (McGurl, et al., (1992) Science 225:1570-1573); WIP1 (Rohmeier, et al., (1993) Plant Mol. Biol. 22:783-792; Eckelkamp, et al., (1993) FEBS Letters 323:73-76); MPI gene (Corderok, et al., (1994) Plant J. 6(2):141-150) and the like, herein incorporated by reference.

[0178] Additionally, pathogen-inducible promoters may be employed in the methods and nucleotide constructs of the embodiments. Such pathogen-inducible promoters include those from pathogenesis-related proteins (PR proteins), which are induced following infection by a pathogen; e.g., PR proteins, SAR proteins, beta-1,3-glucanase, chitinase, etc. See, for example, Redolfi, et al., (1983) Neth. J. Plant Pathol. 89:245-254; Uknes, et al., (1992) Plant Cell 4: 645-656 and Van Loon, (1985) Plant Mol. Virol. 4:111-116. See also, WO 1999/43819, herein incorporated by reference.

[0179] Of interest are promoters that are expressed locally at or near the site of pathogen infection. See, for example, Marineau, et al., (1987) Plant Mol. Biol. 9:335-342; Matton, et al., (1989) Molecular Plant-Microbe Interactions 2:325-331; Somsisch, et al., (1986) Proc. Natl. Acad. Sci. USA 83:2427-2430; Somsisch, et al., (1988) Mol. Gen. Genet. 2:93-98 and Yang, (1996) Proc. Natl. Acad. Sci. USA 93:14972-14977. See also, Chen, et al., (1996) Plant J. 10:955-966; Zhang, et al., (1994) Proc. Natl. Acad. Sci. USA 91:2507-2511; Warner, et al., (1993) Plant J. 3:191-201; Siebertz, et al., (1989) Plant Cell 1:961-968; U.S. Pat. No. 5,750,386 (nematode-inducible) and the references cited therein. Of particular interest is the inducible promoter for the maize PRms gene, whose expression is induced by the pathogen Fusarium moniliforme (see, for example, Cordero, et al., (1992) Physiol. Mol. Plant Path. 41:189-200).

[0180] Chemical-regulated promoters can be used to modulate the expression of a gene in a plant through the application of an exogenous chemical regulator. Depending upon the objective, the promoter may be a chemical-inducible promoter, where application of the chemical induces gene expression or a chemical-repressible promoter, where application of the chemical represses gene expression. Chemical-inducible promoters are known in the art and include, but are not limited to, the maize In2-2 promoter, which is activated by benzenesulfonamide herbicide safeners, the maize GST promoter, which is activated by hydrophobic electrophilic compounds that are used as pre-emergent herbicides, and the tobacco PR-la promoter, which is activated by salicylic acid. Other chemical-regulated promoters of interest include steroid-responsive promoters (see, for example, the glucocorticoid-inducible promoter in Schena, et al., (1991) Proc. Natl. Acad. Sci. USA 88:10421-10425 and McNellis, et al., (1998) Plant J. 14(2):247-257) and tetracycline-inducible and tetracycline-repressible promoters (see, for example, Gatz, et al., (1991) Mol. Gen. Genet. 227:229-237 and U.S. Pat. Nos. 5,814,618 and 5,789,156), herein incorporated by reference.

[0181] Tissue-preferred promoters can be utilized to target enhanced IPD079 polypeptide expression within a particular plant tissue. Tissue-preferred promoters include those discussed in Yamamoto, et al., (1997) Plant J. 12(2)255-265; Kawamata, et al., (1997) Plant Cell Physiol. 38(7):792-803; Hansen, et al., (1997) Mol. Gen Genet. 254(3):337-343; Russell, et al., (1997) Transgenic Res. 6(2): 157-168; Rinehart, et al., (1996) Plant Physiol. 112(3): 1331-1341; Van Camp, et al., (1996) Plant Physiol. 112(2):525-535; Canevascini, et al., (1996) Plant Physiol. 112(2):513-524; Yamamoto, et al., (1994) Plant Cell Physiol. 35(5):773-778; Lam, (1994) Results Probl. Cell Differ. 20:181-196; Orozco, et al., (1993) Plant Mol Biol. 23(6):1129-1138; Matsuoka, et al., (1993) Proc Natl. Acad. Sci. USA 90(20):9586-9590 and Guevara-Garcia, et al., (1993) Plant J. 4(3):495-505. Such promoters can be modified, if necessary, for weak expression.

[0182] Leaf-preferred promoters are known in the art. See, for example, Yamamoto, et al., (1997) Plant J. 12(2):255-265; Kwon, et al., (1994) Plant Physiol. 105:357-67; Yamamoto, et al., (1994) Plant Cell Physiol. 35(5):773-778; Gotor, et al., (1993) Plant J. 3:509-18; Orozco, et al., (1993) Plant Mol. Biol. 23(6):1129-1138 and Matsuoka, et al., (1993) Proc. Natl. Acad. Sci. USA 90(20):9586-9590.

[0183] Root-preferred or root-specific promoters are known and can be selected from the many available from the literature or isolated de novo from various compatible species. See, for example, Hire, et al., (1992) Plant Mol. Biol. 20(2):207-218 (soybean root-specific glutamine synthetase gene); Keller and Baumgartner, (1991) Plant Cell 3(10):1051-1061 (root-specific control element in the GRP 1.8 gene of French bean); Sanger, et al., (1990) Plant Mol. Biol. 14(3):433-443 (root-specific promoter of the mannopine synthase (MAS) gene of Agrobacterium tumefaciens) and Miao, et al., (1991) Plant Cell 3(1):11-22 (full-length cDNA clone encoding cytosolic glutamine synthetase (GS), which is expressed in roots and root nodules of soybean). See also, Bogusz, et al., (1990) Plant Cell 2(7):633-641, where two root-specific promoters isolated from hemoglobin genes from the nitrogen-fixing nonlegume Parasponia andersonii and the related non-nitrogen-fixing nonlegume Trema tomentosa are described. The promoters of these genes were linked to a β-glucuronidase reporter gene and introduced into both the nonlegume Nicotiana tabacum and the legume Lotus corniculatus, and in both instances root-specific promoter activity was preserved. Leach and Aoyagi, (1991) describe their analysis of the promoters of the highly expressed rolC and rolD root-inducing genes of Agrobacterium rhizogenes (see, Plant Science (Limerick) 79(1):69-76). They concluded that enhancer and tissue-preferred DNA determinants are dissociated in those promoters. Teeri, et al., (1989) used gene fusion to lacZ to show that the Agrobacterium T-DNA gene encoding octopine synthase is especially active in the epidermis of the root tip and that the TR2′ gene is root specific in the intact plant and stimulated by wounding in leaf tissue, an especially desirable combination of characteristics for use with an insecticidal or larvicidal gene (see, EMBO J. 8(2):343-350). The TR1′ gene fused to nptll (neomycin phosphotransferase II) showed similar characteristics. Additional root-preferred promoters include the VfENOD-GRP3 gene promoter (Kuster, et al., (1995) Plant Mol. Biol. 29(4):759-772) and rolB promoter (Capana, et al., (1994) Plant Mol. Biol. 25(4):681-691. See also, U.S. Pat. Nos. 5,837,876; 5,750,386; 5,633,363; 5,459,252; 5,401,836; 5,110,732 and 5,023,179. Arabidopsis thaliana root-preferred regulatory sequences are disclosed in US20130117883.

[0184] “Seed-preferred” promoters include both “seed-specific” promoters (those promoters active during seed development such as promoters of seed storage proteins) as well as “seed-germinating” promoters (those promoters active during seed germination). See, Thompson, et al., (1989) BioEssays 10:108, herein incorporated by reference. Such seed-preferred promoters include, but are not limited to, Ciml (cytokinin-induced message); cZ19B1 (maize 19 kDa zein); and milps (myo-inositol-1-phosphate synthase) (see, U.S. Pat. No. 6,225,529, herein incorporated by reference). Gamma-zein and Glb-1 are endosperm-specific promoters. For dicots, seed-specific promoters include, but are not limited to, Kunitz trypsin inhibitor 3 (KTi3) (Jofuku and Goldberg, (1989) Plant Cell 1:1079-1093), bean β-phaseolin, napin,β-conglycinin, glycinin 1, soybean lectin, cruciferin, and the like. For monocots, seed-specific promoters include, but are not limited to, maize 15 kDa zein, 22 kDa zein, 27 kDa zein, g-zein, waxy, shrunken 1, shrunken 2, globulin 1, etc. See also, WO 2000/12733, where seed-preferred promoters from end1 and end2 genes are disclosed; herein incorporated by reference. In dicots, seed specific promoters include but are not limited to seed coat promoter from Arabidopsis, pBAN; and the early seed promoters from Arabidopsis, p26, p63, and p63tr (U.S. Pat. Nos. 7,294,760 and 7,847,153). A promoter that has “preferred” expression in a particular tissue is expressed in that tissue to a greater degree than in at least one other plant tissue. Some tissue-preferred promoters show expression almost exclusively in the particular tissue.

[0185] Where low level expression is desired, weak promoters will be used. Generally, the term “weak promoter” as used herein refers to a promoter that drives expression of a coding sequence at a low level. By low level expression at levels of between about 1/1000 transcripts to about 1/100,000 transcripts to about 1/500,000 transcripts is intended. Alternatively, it is recognized that the term “weak promoters” also encompasses promoters that drive expression in only a few cells and not in others to give a total low level of expression. Where a promoter drives expression at unacceptably high levels, portions of the promoter sequence can be deleted or modified to decrease expression levels.

[0186] Such weak constitutive promoters include, for example the core promoter of the Rsyn7 promoter (WO 1999/43838 and U.S. Pat. No. 6,072,050), the core 35S CaMV promoter, and the like. Other constitutive promoters include, for example, those disclosed in U.S. Pat. Nos. 5,608,149; 5,608,144; 5,604,121; 5,569,597; 5,466,785; 5,399,680; 5,268,463; 5,608,142 and 6,177,611.

[0187] The above list of promoters is not meant to be limiting. Any appropriate promoter can be used in the embodiments.

[0188] Generally, the expression cassette will comprise a selectable marker gene for the selection of transformed cells. Selectable marker genes are utilized for the selection of transformed cells or tissues. Marker genes include genes encoding antibiotic resistance, such as those encoding neomycin phosphotransferase II (NEO) and hygromycin phosphotransferase (HPT), as well as genes conferring resistance to herbicidal compounds, such as glufosinate ammonium, bromoxynil, imidazolinones and 2,4-dichlorophenoxyacetate (2,4-D). Additional examples of suitable selectable marker genes include, but are not limited to, genes encoding resistance to chloramphenicol (Herrera Estrella, et al., (1983) EMBO J. 2:987-992); methotrexate (Herrera Estrella, et al., (1983) Nature 303:209-213 and Meijer, et al., (1991) Plant Mol. Biol. 16:807-820); streptomycin (Jones, et al., (1987) Mol. Gen. Genet. 210:86-91); spectinomycin (Bretagne-Sagnard, et al., (1996) Transgenic Res. 5:131-137); bleomycin (Hille, et al., (1990) Plant Mol. Biol. 7:171-176); sulfonamide (Guerineau, et al., (1990) Plant Mol. Biol. 15:127-136); bromoxynil (Stalker, et al., (1988) Science 242:419-423); glyphosate (Shaw, et al., (1986) Science 233:478-481 and U.S. patent application Ser. Nos. 10/004,357 and 10/427,692); phosphinothricin (DeBlock, et al., (1987) EMBO J. 6:2513-2518). See generally, Yarranton, (1992) Curr. Opin. Biotech. 3:506-511; Christopherson, et al., (1992) Proc. Natl. Acad. Sci. USA 89:6314-6318; Yao, et al., (1992) Cell 71:63-72; Reznikoff, (1992) Mol. Microbiol. 6:2419-2422; Barkley, et al., (1980) in The Operon, pp. 177-220; Hu, et al., (1987) Cell 48:555-566; Brown, et al., (1987) Cell 49:603-612; Figge, et al., (1988) Cell 52:713-722; Deuschle, et al., (1989)Proc. Natl. Acad. Sci. USA 86:5400-5404; Fuerst, et al., (1989) Proc. Natl. Acad. Sci. USA 86:2549-2553; Deuschle, et al., (1990) Science 248:480-483; Gossen, (1993) Ph.D. Thesis, University of Heidelberg; Reines, et al., (1993) Proc. Natl. Acad. Sci. USA 90:1917-1921; Labow, et al., (1990) Mol. Cell. Biol. 10:3343-3356; Zambretti, et al., (1992)Proc. Natl. Acad. Sci. USA 89:3952-3956; Baim, et al., (1991) Proc. Natl. Acad. Sci. USA 88:5072-5076; Wyborski, et al., (1991) Nucleic Acids Res. 19:4647-4653; Hillenand-Wissman, (1989) Topics Mol. Struc. Biol. 10:143-162; Degenkolb, et al., (1991) Antimicrob. Agents Chemother. 35:1591-1595; Kleinschnidt, et al., (1988) Biochemistry 27:1094-1104; Bonin, (1993) Ph.D. Thesis, University of Heidelberg; Gossen, et al., (1992)Proc. Natl. Acad. Sci. USA 89:5547-5551; Oliva, et al., (1992) Antimicrob. Agents Chemother. 36:913-919; Hlavka, et al., (1985) Handbook of Experimental Pharmacology, Vol. 78 (Springer-Verlag, Berlin) and Gill, et al., (1988) Nature 334:721-724.

[0189] The above list of selectable marker genes is not meant to be limiting. Any selectable marker gene can be used in the embodiments.

[0190] Plant Transformation

[0191] The methods of the embodiments involve introducing a polypeptide or polynucleotide into a plant. “Introducing” is as used herein means presenting to the plant the polynucleotide or polypeptide in such a manner that the sequence gains access to the interior of a cell of the plant. The methods of the embodiments do not depend on a particular method for introducing a polynucleotide or polypeptide into a plant, only that the polynucleotide or polypeptides gains access to the interior of at least one cell of the plant. Methods for introducing polynucleotide or polypeptides into plants are known in the art including, but not limited to, stable transformation methods, transient transformation methods, and virus-mediated methods.

[0192] “Stable transformation” is as used herein means that the nucleotide construct introduced into a plant integrates into the genome of the plant and is capable of being inherited by the progeny thereof “Transient transformation” as used herein means that a polynucleotide is introduced into the plant and does not integrate into the genome of the plant or a polypeptide is introduced into a plant. “Plant” as used herein refers to whole plants, plant organs (e.g., leaves, stems, roots, etc.), seeds, plant cells, propagules, embryos and progeny of the same. Plant cells can be differentiated or undifferentiated (e.g. callus, suspension culture cells, protoplasts, leaf cells, root cells, phloem cells and pollen).

[0193] Transformation protocols as well as protocols for introducing nucleotide sequences into plants may vary depending on the type of plant or plant cell, i.e., monocot or dicot, targeted for transformation. Suitable methods of introducing nucleotide sequences into plant cells and subsequent insertion into the plant genome include microinjection (Crossway, et al., (1986) Biotechniques 4:320-334), electroporation (Riggs, et al., (1986) Proc. Natl. Acad. Sci. USA 83:5602-5606), Agrobacterium-mediated transformation (U.S. Pat. Nos. 5,563,055 and 5,981,840), direct gene transfer (Paszkowski, et al., (1984) EMBO J. 3:2717-2722) and ballistic particle acceleration (see, for example, U.S. Pat. Nos. 4,945,050; 5,879,918; 5,886,244 and 5,932,782; Tomes, et al., (1995) in Plant Cell, Tissue, and Organ Culture: Fundamental Methods, ed. Gamborg and Phillips, (Springer-Verlag, Berlin) and McCabe, et al., (1988) Biotechnology 6:923-926) and Lecl transformation (WO 00/28058). For potato transformation see, Tu, et al., (1998) Plant Molecular Biology 37:829-838 and Chong, et al., (2000) Transgenic Research 9:71-78. Additional transformation procedures can be found in Weissinger, et al., (1988) Ann. Rev. Genet. 22:421-477; Sanford, et al., (1987) Particulate Science and Technology 5:27-37 (onion); Christou, et al., (1988) Plant Physiol. 87:671-674 (soybean); McCabe, et al., (1988) Bio/Technology 6:923-926 (soybean); Finer and McMullen, (1991) In Vitro Cell Dev. Biol. 27P:175-182 (soybean); Singh, et al., (1998) Theor. Appl. Genet. 96:319-324 (soybean); Datta, et al., (1990) Biotechnology 8:736-740 (rice); Klein, et al., (1988) Proc. Natl. Acad. Sci. USA 85:4305-4309 (maize); Klein, et al., (1988) Biotechnology 6:559-563 (maize); U.S. Pat. Nos. 5,240,855; 5,322,783 and 5,324,646; Klein, et al., (1988) Plant Physiol. 91:440-444 (maize); Fromm, et al., (1990) Biotechnology 8:833-839 (maize); Hooykaas-Van Slogteren, et al., (1984) Nature (London) 311:763-764; U.S. Pat. No. 5,736,369 (cereals); Bytebier, et al., (1987) Proc. Natl. Acad. Sci. USA 84:5345-5349 (Liliaceae); De Wet, et al., (1985) in The Experimental Manipulation of Ovule Tissues, ed. Chapman, et al., (Longman, New York), pp. 197-209 (pollen); Kaeppler, et al., (1990) Plant Cell Reports 9:415-418 and Kaeppler, et al., (1992) Theor. Appl. Genet. 84:560-566 (whisker-mediated transformation); D'Halluin, et al., (1992) Plant Cell 4:1495-1505 (electroporation); Li, et al., (1993) Plant Cell Reports 12:250-255 and Christou and Ford, (1995) Annals of Botany 75:407-413 (rice); Osjoda, et al., (1996) Nature Biotechnology 14:745-750 (maize via Agrobacterium tumefaciens).

[0194] In specific embodiments, the sequences of the embodiments can be provided to a plant using a variety of transient transformation methods. Such transient transformation methods include, but are not limited to, the introduction of the IPD079 polynucleotide or variants and fragments thereof directly into the plant or the introduction of the IPD079 polypeptide transcript into the plant. Such methods include, for example, microinjection or particle bombardment. See, for example, Crossway, et al., (1986) Mol Gen. Genet. 202:179-185; Nomura, et al., (1986) Plant Sci. 44:53-58; Hepler, et al., (1994) Proc. Natl. Acad. Sci. 91:2176-2180 and Hush, et al., (1994) The Journal of Cell Science 107:775-784, all of which are herein incorporated by reference. Alternatively, the IPD079 polynucleotide can be transiently transformed into the plant using techniques known in the art. Such techniques include viral vector system and the precipitation of the polynucleotide in a manner that precludes subsequent release of the DNA. Thus, transcription from the particle-bound DNA can occur, but the frequency with which it is released to become integrated into the genome is greatly reduced. Such methods include the use of particles coated with polyethylimine (PEI; Sigma #P3143).

[0195] Methods are known in the art for the targeted insertion of a polynucleotide at a specific location in the plant genome. In one embodiment, the insertion of the polynucleotide at a desired genomic location is achieved using a site-specific recombination system. See, for example, WO 1999/25821, WO 1999/25854, WO 1999/25840, WO 1999/25855 and WO 1999/25853, all of which are herein incorporated by reference. Briefly, the polynucleotide of the embodiments can be contained in transfer cassette flanked by two non-identical recombination sites. The transfer cassette is introduced into a plant have stably incorporated into its genome a target site which is flanked by two non-identical recombination sites that correspond to the sites of the transfer cassette. An appropriate recombinase is provided and the transfer cassette is integrated at the target site. The polynucleotide of interest is thereby integrated at a specific chromosomal position in the plant genome.

[0196] Plant transformation vectors may be comprised of one or more DNA vectors needed for achieving plant transformation. For example, it is a common practice in the art to utilize plant transformation vectors that are comprised of more than one contiguous DNA segment. These vectors are often referred to in the art as “binary vectors”. Binary vectors as well as vectors with helper plasmids are most often used for Agrobacterium-mediated transformation, where the size and complexity of DNA segments needed to achieve efficient transformation is quite large, and it is advantageous to separate functions onto separate DNA molecules. Binary vectors typically contain a plasmid vector that contains the cis-acting sequences required for T-DNA transfer (such as left border and right border), a selectable marker that is engineered to be capable of expression in a plant cell, and a “gene of interest” (a gene engineered to be capable of expression in a plant cell for which generation of transgenic plants is desired). Also present on this plasmid vector are sequences required for bacterial replication. The cis-acting sequences are arranged in a fashion to allow efficient transfer into plant cells and expression therein. For example, the selectable marker gene and the pesticidal gene are located between the left and right borders. Often a second plasmid vector contains the trans-acting factors that mediate T-DNA transfer from Agrobacterium to plant cells. This plasmid often contains the virulence functions (Vir genes) that allow infection of plant cells by Agrobacterium, and transfer of DNA by cleavage at border sequences and vir-mediated DNA transfer, as is understood in the art (Hellens and Mullineaux, (2000) Trends in Plant Science 5:446-451). Several types of Agrobacterium strains (e.g. LBA4404, GV3101, EHA101, EHA105, etc.) can be used for plant transformation. The second plasmid vector is not necessary for transforming the plants by other methods such as microprojection, microinjection, electroporation, polyethylene glycol, etc.

[0197] In general, plant transformation methods involve transferring heterologous DNA into target plant cells (e.g., immature or mature embryos, suspension cultures, undifferentiated callus, protoplasts, etc.), followed by applying a maximum threshold level of appropriate selection (depending on the selectable marker gene) to recover the transformed plant cells from a group of untransformed cell mass. Following integration of heterologous foreign DNA into plant cells, one then applies a maximum threshold level of appropriate selection in the medium to kill the untransformed cells to separate and proliferate the putatively transformed cells that survive from this selection treatment by transferring regularly to a fresh medium. By continuous passage and challenge with appropriate selection, one identifies and proliferates the cells that are transformed with the plasmid vector. Molecular and biochemical methods can then be used to confirm the presence of the integrated heterologous gene of interest into the genome of the transgenic plant.

[0198] Explants are typically transferred to a fresh supply of the same medium and cultured routinely. Subsequently, the transformed cells are differentiated into shoots after placing on regeneration medium supplemented with a maximum threshold level of selecting agent. The shoots are then transferred to a selective rooting medium for recovering rooted shoot or plantlet. The transgenic plantlet then grows into a mature plant and produces fertile seeds (e.g., Hiei, et al., (1994) The Plant Journal 6:271-282; Ishida, et al., (1996) Nature Biotechnology 14:745-750). Explants are typically transferred to a fresh supply of the same medium and cultured routinely. A general description of the techniques and methods for generating transgenic plants are found in Ayres and Park, (1994) Critical Reviews in Plant Science 13:219-239 and Bommineni and Jauhar, (1997) Maydica 42:107-120. Since the transformed material contains many cells; both transformed and non-transformed cells are present in any piece of subjected target callus or tissue or group of cells. The ability to kill non-transformed cells and allow transformed cells to proliferate results in transformed plant cultures. Often, the ability to remove non-transformed cells is a limitation to rapid recovery of transformed plant cells and successful generation of transgenic plants.

[0199] The cells that have been transformed may be grown into plants in accordance with conventional ways. See, for example, McCormick, et al., (1986) Plant Cell Reports 5:81-84. These plants may then be grown, and either pollinated with the same transformed strain or different strains, and the resulting hybrid having constitutive or inducible expression of the desired phenotypic characteristic identified. Two or more generations may be grown to ensure that expression of the desired phenotypic characteristic is stably maintained and inherited and then seeds harvested to ensure that expression of the desired phenotypic characteristic has been achieved.

[0200] The nucleotide sequences of the embodiments may be provided to the plant by contacting the plant with a virus or viral nucleic acids. Generally, such methods involve incorporating the nucleotide construct of interest within a viral DNA or RNA molecule. It is recognized that the recombinant proteins of the embodiments may be initially synthesized as part of a viral polyprotein, which later may be processed by proteolysis in vivo or in vitro to produce the desired IPD079 polypeptide. It is also recognized that such a viral polyprotein, comprising at least a portion of the amino acid sequence of an IPD079 of the embodiments, may have the desired pesticidal activity. Such viral polyproteins and the nucleotide sequences that encode for them are encompassed by the embodiments. Methods for providing plants with nucleotide constructs and producing the encoded proteins in the plants, which involve viral DNA or RNA molecules, are known in the art. See, for example, U.S. Pat. Nos. 5,889,191; 5,889,190; 5,866,785; 5,589,367 and 5,316,931; herein incorporated by reference.

[0201] Methods for transformation of chloroplasts are known in the art. See, for example, Svab, et al., (1990) Proc. Natl. Acad. Sci. USA 87:8526-8530; Svab and Maliga, (1993) Proc. Natl. Acad. Sci. USA 90:913-917; Svab and Maliga, (1993) EMBO J. 12:601-606. The method relies on particle gun delivery of DNA containing a selectable marker and targeting of the DNA to the plastid genome through homologous recombination. Additionally, plastid transformation can be accomplished by transactivation of a silent plastid-borne transgene by tissue-preferred expression of a nuclear-encoded and plastid-directed RNA polymerase. Such a system has been reported in McBride, et al., (1994) Proc. Natl. Acad. Sci. USA 91:7301-7305.

[0202] The embodiments further relate to plant-propagating material of a transformed plant of the embodiments including, but not limited to, seeds, tubers, corms, bulbs, leaves and cuttings of roots and shoots.

[0203] The embodiments may be used for transformation of any plant species, including, but not limited to, monocots and dicots. Examples of plants of interest include, but are not limited to, corn (Zea mays), Brassica sp. (e.g., B. napus, B. rapa, B. juncea), particularly those Brassica species useful as sources of seed oil, alfalfa (Medicago sativa), rice (Oryza sativa), rye (Secale cereale), sorghum (Sorghum bicolor, Sorghum vulgare), millet (e.g., pearl millet (Pennisetum glaucum), proso millet (Panicum miliaceum), foxtail millet (Setaria italica), finger millet (Eleusine coracana)), sunflower (Helianthus annuus), safflower (Carthamus tinctorius), wheat (Triticum aestivum), soybean (Glycine max), tobacco (Nicotiana tabacum), potato (Solanum tuberosum), peanuts (Arachis hypogaea), cotton (Gossypium barbadense, Gossypium hirsutum), sweet potato (Ipomoea batatus), cassava (Manihot esculenta), coffee (Coffea spp.), coconut (Cocos nucifera), pineapple (Ananas comosus), citrus trees (Citrus spp.), cocoa (Theobroma cacao), tea (Camellia sinensis), banana (Musa spp.), avocado (Persea americana), fig (Ficus casica), guava (Psidium guajava), mango (Mangifera indica), olive (Olea europaea), papaya (Carica papaya), cashew (Anacardium occidentale), macadamia (Macadamia integrifolia), almond (Prunus amygdalus), sugar beets (Beta vulgaris), sugarcane (Saccharum spp.), oats, barley, vegetables ornamentals, and conifers.

[0204] Vegetables include tomatoes (Lycopersicon esculentum), lettuce (e.g., Lactuca sativa), green beans (Phaseolus vulgaris), lima beans (Phaseolus limensis), peas (Lathyrus spp.), and members of the genus Cucumis such as cucumber (C. sativus), cantaloupe (C. cantalupensis), and musk melon (C. melo). Ornamentals include azalea (Rhododendron spp.), hydrangea (Macrophylla hydrangea), hibiscus (Hibiscus rosasanensis), roses (Rosa spp.), tulips (Tulipa spp.), daffodils (Narcissus spp.), petunias (Petunia hybrida), carnation (Dianthus caryophyllus), poinsettia (Euphorbia pulcherri ma), and chrysanthemum. Conifers that may be employed in practicing the embodiments include, for example, pines such as loblolly pine (Pinus taeda), slash pine (Pinus elliotii), ponderosa pine (Pinus ponderosa), lodgepole pine (Pinus contorta), and Monterey pine (Pinus radiata); Douglas-fir (Pseudotsuga menziesii); Western hemlock (Tsuga canadensis); Sitka spruce (Picea glauca); redwood (Sequoia sempervirens); true firs such as silver fir (Abies amabilis) and balsam fir (Abies balsamea); and cedars such as Western red cedar (Thuja plicata) and Alaska yellow-cedar (Chamaecyparis nootkatensis). Plants of the embodiments include crop plants (for example, corn, alfalfa, sunflower, Brassica, soybean, cotton, safflower, peanut, sorghum, wheat, millet, tobacco, etc.), such as corn and soybean plants.

[0205] Turf grasses include, but are not limited to: annual bluegrass (Poa annua); annual ryegrass (Lolium multilforum); Canada bluegrass (Poa compressa); Chewing's fescue (Festuca rubra); colonial bentgrass (Agrostis tenuis); creeping bentgrass (Agrostis palustris); crested wheatgrass (Agropyron desertorum); fairway wheatgrass (Agropyron cristatum); hard fescue (Festuca longifolia); Kentucky bluegrass (Poa pratensis); orchardgrass (Dactylis glomerata); perennial ryegrass (Loliumperenne); red fescue (Festuca rubra); redtop (Agrostis alba); rough bluegrass (Poa trivialis); sheep fescue (Festuca ovina); smooth bromegrass (Bromus inermis); tall fescue (Festuca arundinacea); timothy (Phleum pratense); velvet bentgrass (Agrostis canna); weeping alkaligrass (Puccinellia distans); western wheatgrass (Agropyron smithii); Bermuda grass (Cynodon spp.); St. Augustine grass (Stenotaphrum secundatum); zoysia grass (Zoysia spp.); Bahia grass (Paspalum notatum); carpet grass (Axonopus affinis); centipede grass (Eremochloa ophiuroides); kikuyu grass (Pennisetum clandesinum); seashore paspalum (Paspalum vaginatum); blue gramma (Bouteloua gracilis); buffalo grass (Buchloe dactyloids); sideoats gramma (Bouteloua curtipendula).

[0206] Plants of interest include grain plants that provide seeds of interest, oil-seed plants, and leguminous plants. Seeds of interest include grain seeds, such as corn, wheat, barley, rice, sorghum, rye, millet, etc. Oil-seed plants include cotton, soybean, safflower, sunflower, Brassica, maize, alfalfa, palm, coconut, flax, castor, olive, etc. Leguminous plants include beans and peas. Beans include guar, locust bean, fenugreek, soybean, garden beans, cowpea, mung bean, lima bean, fava bean, lentils, chickpea, etc.

[0207] Following introduction of heterologous foreign DNA into plant cells, the transformation or integration of heterologous gene in the plant genome is confirmed by various methods such as analysis of nucleic acids, proteins and metabolites associated with the integrated gene.

[0208] PCR analysis is a rapid method to screen transformed cells, tissue or shoots for the presence of incorporated gene at the earlier stage before transplanting into the soil (Sambrook and Russell, (2001) Molecular Cloning: A Laboratory Manual. Cold Spring Harbor Laboratory Press, Cold Spring Harbor, N.Y.). PCR is carried out using oligonucleotide primers specific to the gene of interest or Agrobacterium vector background, etc.

[0209] Plant transformation may be confirmed by Southern blot analysis of genomic DNA (Sambrook and Russell, (2001) supra). In general, total DNA is extracted from the transformant, digested with appropriate restriction enzymes, fractionated in an agarose gel and transferred to a nitrocellulose or nylon membrane. The membrane or “blot” is then probed with, for example, radiolabeled 32P target DNA fragment to confirm the integration of introduced gene into the plant genome according to standard techniques (Sambrook and Russell, (2001) supra).

[0210] In Northern blot analysis, RNA is isolated from specific tissues of transformant, fractionated in a formaldehyde agarose gel, and blotted onto a nylon filter according to standard procedures that are routinely used in the art (Sambrook and Russell, (2001) supra). Expression of RNA encoded by the pesticidal gene is then tested by hybridizing the filter to a radioactive probe derived from a pesticidal gene, by methods known in the art (Sambrook and Russell, (2001) supra).

[0211] Western blot, biochemical assays and the like may be carried out on the transgenic plants to confirm the presence of protein encoded by the pesticidal gene by standard procedures (Sambrook and Russell, 2001, supra) using antibodies that bind to one or more epitopes present on the IPD079 polypeptide.

[0212] Stacking of Traits IPD079 and Silencing Elements in Transgenic Plant

[0213] Transgenic plants may comprise a stack of one or more insecticidal polynucleotides encoding IPD079 polypeptides disclosed herein with one or more additional silencing element polynucleotides resulting in the production or suppression of multiple polypeptide sequences. Transgenic plants comprising stacks of polynucleotide sequences can be obtained by either or both of traditional breeding methods or through genetic engineering methods. These methods include, but are not limited to, breeding individual lines each comprising a polynucleotide of interest, transforming a transgenic plant comprising a gene disclosed herein with a subsequent gene and co-transformation of genes into a single plant cell. As used herein, the term “stacked” includes having the multiple traits present in the same plant (i.e., both traits are incorporated into the nuclear genome, one trait is incorporated into the nuclear genome and one trait is incorporated into the genome of a plastid or both traits are incorporated into the genome of a plastid). In one non-limiting example, “stacked traits” comprise a molecular stack where the sequences are physically adjacent to each other. A trait, as used herein, refers to the phenotype derived from a particular sequence or groups of sequences. Co-transformation of genes can be carried out using single transformation vectors comprising multiple genes or genes carried separately on multiple vectors. If the sequences are stacked by genetically transforming the plants, the polynucleotide sequences of interest can be combined at any time and in any order. The traits can be introduced simultaneously in a co-transformation protocol with the polynucleotides of interest provided by any combination of transformation cassettes. For example, if two sequences will be introduced, the two sequences can be contained in separate transformation cassettes (trans) or contained on the same transformation cassette (cis). Expression of the sequences can be driven by the same promoter or by different promoters. In certain cases, it may be desirable to introduce a transformation cassette that will suppress the expression of the polynucleotide of interest. This may be combined with any combination of other suppression cassettes or overexpression cassettes to generate the desired combination of traits in the plant. It is further recognized that polynucleotide sequences can be stacked at a desired genomic location using a site-specific recombination system. See, for example, WO 1999/25821, WO 1999/25854, WO 1999/25840, WO 1999/25855 and WO 1999/25853.

[0214] In some embodiments the polynucleotides encoding one or more of the IPD079 polypeptide disclosed herein, alone or stacked with one or more additional insect resistance traits can be stacked with one or more additional input traits (e.g., herbicide resistance, fungal resistance, virus resistance, stress tolerance, disease resistance, male sterility, stalk strength, and the like) or output traits (e.g., increased yield, modified starches, improved oil profile, balanced amino acids, high lysine or methionine, increased digestibility, improved fiber quality, drought resistance, and the like). Thus, the polynucleotide embodiments can be used to provide a complete agronomic package of improved crop quality with the ability to flexibly and cost effectively control any number of agronomic pests.

[0215] In some embodiments polynucleotides encoding one or more of the plant perforins or IPD079 polypeptides disclosed herein are stacked with one or more polynucleotides encoding pesticidal proteins or silencing elements disclosed herein. In certain embodiments, embodiments polynucleotides encoding one or more of the plant perforins or IPD079 polypeptides disclosed herein are stacked with one or more polynucleotides encoding a silencing element as set forth in SEQ ID NOs: 1279-1376.

[0216] In some embodiments the stacked trait may be in the form of silencing of one or more polynucleotides of interest resulting in suppression of one or more target pest polypeptides. In some embodiments the silencing is achieved through the use of a suppression DNA construct.

[0217] In some embodiments the polynucleotides encoding the IPD079 polypeptides disclosed herein are stacked with one or more polynucleotides encoding silencing elements targeting Coatomer, subunit alpha (SEQ ID NO: 1279), Coatomer, subunit gamma (SEQ ID NO: 1280), MAEL (SEQ ID NO: 1337), NCLB (SEQ ID NO: 1338), or BOULE (SEQ ID NO: 1341). In one embodiment, the polynucleotides encoding the IPD079 polypeptides disclosed herein are stacked with polynucleotides encoding a silencing element disclosed in International Patent Application Publicaiton Numbers. WO 2016/205445, WO2016138106, WO 2016/060911, WO 2016/060912, WO 2016/060913, and WO 2016/060914, or US Patent Application Publication No. US US2014/0275208 or US2015/0257389. In one embodiment, the polynucleotides encoding one or more of the IPD079 polypeptides disclosed herein are stacked with polynucleotides encoding one or more silencing elements directed to any one or more of the target sequences of SEQ ID NOs: 1279-1376.

[0218] In some embodiments the polynucleotides encoding the IPD079 polypeptides and polynucleotides encoding silencing elements disclosed herein are to be stacked with one or more additional insect resistance traits can be stacked with one or more additional input traits (e.g., herbicide resistance, fungal resistance, virus resistance, stress tolerance, disease resistance, male sterility, stalk strength, and the like) or output traits (e.g., increased yield, modified starches, improved oil profile, balanced amino acids, high lysine or methionine, increased digestibility, improved fiber quality, drought resistance, and the like). Thus, the polynucleotide embodiments can be used to provide a complete agronomic package of improved crop quality with the ability to flexibly and cost effectively control any number of agronomic pests.

[0219] Some embodiments relate to down-regulation of expression of target genes in insect pest species by interfering ribonucleic acid (RNA) molecules.

[0220] Some embodiments relate to down-regulation of expression of target genes in insect pest species by interfering ribonucleic acid (RNA) molecules. PCT Publications WO 2007/074405; WO 2005/110068, and WO 2009/091864 describe compositions for inhibiting Colorado potato beetle, Western corn rootworm, and Lygus species.

[0221] Nucleic acid molecules including silencing elements for targeting the vacuolar ATPase H subunit, useful for controlling a coleopteran pest population and infestation as described in US Patent Application Publication 2012/0198586. PCT Publication WO 2012/055982 describes ribonucleic acid (RNA or double stranded RNA) that inhibits or down regulates the expression of a target gene that encodes: an insect ribosomal protein such as the ribosomal protein L19, the ribosomal protein L40 or the ribosomal protein S27A; an insect proteasome subunit such as the Rpn6 protein, the Pros 25, the Rpn2 protein, the proteasome beta 1 subunit protein or the Pros beta 2 protein; an insect (3-coatomer of the COPI vesicle, the γ-coatomer of the COPI vesicle, the β′-coatomer protein or the coatomer of the COPI vesicle; an insect Tetraspanine 2 A protein which is a putative transmembrane domain protein; an insect protein belonging to the actin family such as Actin 5C; an insect ubiquitin-5E protein; an insect Sec23 protein which is a GTPase activator involved in intracellular protein transport; an insect crinkled protein which is an unconventional myosin which is involved in motor activity; an insect crooked neck protein which is involved in the regulation of nuclear alternative mRNA splicing; an insect vacuolar H+-ATPase G-subunit protein and an insect Tbp-1 such as Tat-binding protein. PCT publication WO 2007/035650 describes ribonucleic acid (RNA or double stranded RNA) that inhibits or down regulates the expression of a target gene that encodes Snf7. US Patent Application publication 2011/0054007 describes polynucleotide silencing elements targeting RPS10. US Patent Application publication 2014/0275208 and US2015/0257389 describes polynucleotide silencing elements targeting RyanR, HP2, and PAT3. US Patent Application publication 2011/0054007 describes polynucleotide silencing elements targeting RPS10. PCT publications WO/2016/138106, WO 2016/060911, WO 2016/060912, WO 2016/060913, and WO 2016/060914 describe polynucleotide silencing elements targeting COPI coatomer subunit nucleic acid molecules that confer resistance to Coleopteran and Hemipteran pests. US Patent Application Publications US 20120297501, and 2012/0322660 describe interfering ribonucleic acids (RNA or double stranded RNA) that functions upon uptake by an insect pest species to down-regulate expression of a target gene in said insect pest, wherein the RNA comprises at least one silencing element wherein the silencing element is a region of double-stranded RNA comprising annealed complementary strands, one strand of which comprises or consists of a sequence of nucleotides which is at least partially complementary to a target nucleotide sequence within the target gene. US Patent Application Publication 2012/0164205 describe potential targets for interfering double stranded ribonucleic acids for inhibiting invertebrate pests including: a Chd3 Homologous Sequence, a Beta-Tubulin Homologous Sequence, a 40 kDa V-ATPase Homologous Sequence, a EF1α Homologous Sequence, a 26S Proteosome Subunit p28 Homologous Sequence, a Juvenile Hormone Epoxide Hydrolase Homologous Sequence, a Swelling Dependent Chloride Channel Protein Homologous Sequence, a Glucose-6-Phosphate 1-Dehydrogenase Protein Homologous Sequence, an Act42A Protein Homologous Sequence, a ADP-Ribosylation Factor 1 Homologous Sequence, a Transcription Factor IIB Protein Homologous Sequence, a Chitinase Homologous Sequences, a Ubiquitin Conjugating Enzyme Homologous Sequence, a Glyceraldehyde-3-Phosphate Dehydrogenase Homologous Sequence, an Ubiquitin B Homologous Sequence, a Juvenile Hormone Esterase Homolog, and an Alpha Tubuliln Homologous Sequence.

[0222] In some embodiments, the compositions and methods relate to stacking one or more pesticidal polypeptides. Pesticidal peptides may include, but are not limited to, genes encoding a Bacillus thuringiensis protein, a derivative thereof or a synthetic polypeptide modeled thereon. See, for example, Geiser, et al., (1986) Gene 48:109, who disclose the cloning and nucleotide sequence of a Bt delta-endotoxin gene. Moreover, DNA molecules encoding delta-endotoxin genes can be purchased from American Type Culture Collection (Rockville, Md.), for example, under ATCC® Accession Numbers 40098, 67136, 31995 and 31998. Other non-limiting examples of Bacillus thuringiensis transgenes being genetically engineered are given in the following patents and patent applications: U.S. Pat. Nos. 5,188,960; 5,689,052; 5,880,275; 5,986,177; 6,023,013, 6,060,594, 6,063,597, 6,077,824, 6,620,988, 6,642,030, 6,713,259, 6,893,826, 7,105,332; 7,179,965, 7,208,474; 7,227,056, 7,288,643, 7,323,556, 7,329,736, 7,449,552, 7,468,278, 7,510,878, 7,521,235, 7,544,862, 7,605,304, 7,696,412, 7,629,504, 7,705,216, 7,772,465, 7,790,846, 7,858,849 and WO 1991/14778; WO 1999/31248; WO 2001/12731; WO 1999/24581 and WO 1997/40162.

[0223] Genes encoding pesticidal proteins may also be stacked including but are not limited to: insecticidal proteins from Pseudomonas sp. such as PSEEN3174 (Monalysin, (2011) PLoS Pathogens, 7:1-13), from Pseudomonas protegees strain CHAO and Pf-5 (previously fluorescens) (Pechy-Tarr, (2008) Environmental Microbiology 10:2368-2386: GenBank Accession No. EU400157); from Pseudomonas Taiwanensis (Liu, et al., (2010) J. Agric. Food Chem. 58:12343-12349) and from Pseudomonas pseudoalcligenes (Zhang, et al., (2009) Annals of Microbiology 59:45-50 and Li, et al., (2007) Plant Cell Tiss. Organ Cult. 89:159-168); insecticidal proteins from Photorhabdus sp. and Xenorhabdus sp. (Hinchliffe, et al., (2010) The Open Toxinology Journal 3:101-118 and Morgan, et al., (2001) Applied and Envir. Micro. 67:2062-2069), U.S. Pat. Nos. 6,048,838, and 6,379,946; a PIP-1 polypeptide of U.S. Ser. No. 13/792,861; an AfIP-1A and/or AfIP-1B polypeptide of U.S. Ser. No. 13/800,233; a PHI-4 polypeptide of U.S. Ser. No. 13/839,702; a PIP-47 polypeptide of PCT Serial Number PCT/US14/51063; a PIP-72 polypeptide of PCT Serial Number PCT/US14/55128; a PtIP-50 polypeptide and a PtIP-65 polypeptide of PCT Publication Number WO2015/120270; a PtIP-83 polypeptide of PCT Publication Number WO2015/120276; a PtIP-96 polypeptide of PCT Serial Number PCT/US15/55502; and δ-endotoxins including, but not limited to, the Cry1, Cry2, Cry3, Cry4, Cry5, Cry6, Cry7, Cry8, Cry9, Cry10, Cry11, Cry12, Cry13, Cry14, Cry15, Cry16, Cry17, Cry18, Cry19, Cry20, Cry21, Cry22, Cry23, Cry24, Cry25, Cry26, Cry27, Cry 28, Cry 29, Cry 30, Cry31, Cry32, Cry33, Cry34, Cry35, Cry36, Cry37, Cry38, Cry39, Cry40, Cry41, Cry42, Cry43, Cry44, Cry45, Cry 46, Cry47, Cry49, Cry 51 and Cry55 classes of δ-endotoxin genes and the B. thuringiensis cytolytic Cyt1 and Cyt2 genes. Members of these classes of B. thuringiensis insecticidal proteins include, but are not limited to Cry1Aa1 (Accession # AAA22353); Cry1Aa2 (Accession # Accession # AAA22552); Cry1Aa3 (Accession # BAA00257); Cry1Aa4 (Accession # CAA31886); Cry1Aa5 (Accession # BAA04468); Cry1Aa6 (Accession # AAA86265); Cry1Aa7 (Accession # AAD46139); Cry1Aa8 (Accession #126149); Cry1Aa9 (Accession # BAA77213); Cry1Aa10 (Accession # AAD55382); Cry1Aa11 (Accession # CAA70856); Cry1Aa12 (Accession # AAP80146); Cry1Aa13 (Accession # AAM44305); Cry1Aa14 (Accession # AAP40639); Cry1Aa15 (Accession # AAY66993); Cry1Aa16 (Accession # HQ439776); Cry1Aa17 (Accession # HQ439788); Cry1Aa18 (Accession # HQ439790); Cry1Aa19 (Accession # HQ685121); Cry1Aa20 (Accession # JF340156); Cry1Aa21 (Accession # JN651496); Cry1Aa22 (Accession # KC158223); Cry1Ab1 (Accession # AAA22330); Cry1Ab2 (Accession # AAA22613); Cry1Ab3 (Accession # AAA22561); Cry1Ab4 (Accession # BAA00071); Cry1Ab5 (Accession # CAA28405); Cry1Ab6 (Accession # AAA22420); Cry1Ab7 (Accession # CAA31620); Cry1Ab8 (Accession # AAA22551); Cry1Ab9 (Accession # CAA38701); Cry1Ab10 (Accession # A29125); Cry1Ab11 (Accession #112419); Cry1Ab12 (Accession # AAC64003); Cry1Ab13 (Accession # AAN76494); Cry1Ab14 (Accession # AAG16877); Cry1Ab15 (Accession # AA013302); Cry1Ab16 (Accession # AAK55546); Cry1Ab17 (Accession # AAT46415); Cry1Ab18 (Accession # AAQ88259); Cry1Ab19 (Accession # AAW31761); Cry1Ab20 (Accession # ABB72460); Cry1Ab21 (Accession # ABS18384); Cry1Ab22 (Accession # ABW87320); Cry1Ab23 (Accession # HQ439777); Cry1Ab24 (Accession # HQ439778); Cry1Ab25 (Accession # HQ685122); Cry1Ab26 (Accession # HQ847729); Cry1Ab27 (Accession # JN135249); Cry1Ab28 (Accession # JN135250); Cry1Ab29 (Accession # JN135251); Cry1Ab30 (Accession # JN135252); Cry1Ab31 (Accession # JN135253); Cry1Ab32 (Accession # JN135254); Cry1Ab33 (Accession # AAS93798); Cry1Ab34 (Accession # KC156668); Cry1Ab-like (Accession # AAK14336); Cry1Ab-like (Accession # AAK14337); Cry1Ab-like (Accession # AAK14338); Cry1Ab-like (Accession # ABG88858); Cry1Ac1 (Accession # AAA22331); Cry1Ac2 (Accession # AAA22338); Cry1Ac3 (Accession # CAA38098); Cry1Ac4 (Accession # AAA73077); Cry1Ac5 (Accession # AAA22339); Cry1Ac6 (Accession # AAA86266); Cry1Ac7 (Accession # AAB46989); Cry1Ac8 (Accession # AAC44841); Cry1Ac9 (Accession # AAB49768); Cry1Ac10 (Accession # CAA05505); Cry1Ac11 (Accession # CAA10270); Cry1Ac12 (Accession #112418); Cry1Ac13 (Accession # AAD38701); Cry1Ac14 (Accession # AAQ06607); Cry1Ac15 (Accession # AAN07788); Cry1Ac16 (Accession # AAU87037); Cry1Ac17 (Accession # AAX18704); Cry1Ac18 (Accession # AAY88347); Cry1Ac19 (Accession # ABD37053); Cry1Ac20 (Accession # ABB89046); Cry1Ac21 (Accession # AAY66992); Cry1Ac22 (Accession # ABZ01836); Cry1Ac23 (Accession # CAQ30431); Cry1Ac24 (Accession # ABL01535); Cry1Ac25 (Accession # FJ513324); Cry1Ac26 (Accession # FJ617446); Cry1Ac27 (Accession # FJ617447); Cry1Ac28 (Accession # ACM90319); Cry1Ac29 (Accession # DQ438941); Cry1Ac30 (Accession # GQ227507); Cry1Ac31 (Accession # GU446674); Cry1Ac32 (Accession # HM061081); Cry1Ac33 (Accession # GQ866913); Cry1Ac34 (Accession # HQ230364); Cry1Ac35 (Accession # JF340157); Cry1Ac36 (Accession # JN387137); Cry1Ac37 (Accession # JQ317685); Cry1Ad1 (Accession # AAA22340); Cry1Ad2 (Accession # CAA01880); Cry1Ae1 (Accession # AAA22410); Cry1Af1 (Accession # AAB82749); Cry1Ag1 (Accession # AAD46137); Cry1Ah1 (Accession # AAQ14326); Cry1Ah2 (Accession # ABB76664); Cry1Ah3 (Accession # HQ439779); Cry1Ai1 (Accession # AA039719); Cry1Ai2 (Accession # HQ439780); Cry1A-like (Accession # AAK14339); Cry1Ba1 (Accession # CAA29898); Cry1Ba2 (Accession # CAA65003); Cry1Ba3 (Accession # AAK63251); Cry1Ba4 (Accession # AAK51084); Cry1Ba5 (Accession # AB020894); Cry1Ba6 (Accession # ABL60921); Cry1Ba7 (Accession # HQ439781); Cry1Bb1 (Accession # AAA22344); Cry1Bb2 (Accession # HQ439782); Cry1Bc1 (Accession # CAA86568); Cry1Bd1 (Accession # AAD10292); Cry1Bd2 (Accession # AAM93496); Cry1Be1 (Accession # AAC32850); Cry1Be2 (Accession # AAQ52387); Cry1Be3 (Accession # ACV96720); Cry1Be4 (Accession # HM070026); Cry1Bf1 (Accession # CAC50778); Cry1Bf2 (Accession # AAQ52380); Cry1Bg1 (Accession # AA039720); Cry1Bh1 (Accession # HQ589331); Cry1Bi1 (Accession # KC156700); Cry1Ca1 (Accession # CAA30396); Cry1Ca2 (Accession # CAA31951); Cry1Ca3 (Accession # AAA22343); Cry1Ca4 (Accession # CAA01886); Cry1Ca5 (Accession # CAA65457); Cry1Ca6 [1] (Accession # AAF37224); Cry1Ca7 (Accession # AAG50438); Cry1Ca8 (Accession # AAM00264); Cry1Ca9 (Accession # AAL79362); Cry1Ca10 (Accession # AAN16462); Cry1Ca11 (Accession # AAX53094); Cry1Ca12 (Accession # HM070027); Cry1Ca13 (Accession # HQ412621); Cry1Ca14 (Accession # JN651493); Cry1Cb1 (Accession # M97880); Cry1Cb2 (Accession # AAG35409); Cry1Cb3 (Accession # ACD50894); Cry1Cb-like (Accession # AAX63901); Cry1Da1 (Accession # CAA38099); Cry1Da2 (Accession #176415); Cry1Da3 (Accession # HQ439784); Cry1Db1 (Accession # CAA80234); Cry1Db2 (Accession # AAK48937); Cry1Dc1 (Accession # ABK35074); Cry1Ea1 (Accession # CAA37933); Cry1Ea2 (Accession # CAA39609); Cry1Ea3 (Accession # AAA22345); Cry1Ea4 (Accession # AAD04732); Cry1Ea5 (Accession # A15535); Cry1Ea6 (Accession # AAL50330); Cry1Ea7 (Accession # AAW72936); Cry1Ea8 (Accession # ABX11258); Cry1Ea9 (Accession # HQ439785); Cry1Ea10 (Accession # ADR00398); Cry1Ea11 (Accession # JQ652456); Cry1Eb1 (Accession # AAA22346); Cry1Fa1 (Accession # AAA22348); Cry1Fa2 (Accession # AAA22347); Cry1Fa3 (Accession # HM070028); Cry1Fa4 (Accession # HM439638); Cry1Fb1 (Accession # CAA80235); Cry1Fb2 (Accession # BAA25298); Cry1Fb3 (Accession # AAF21767); Cry1Fb4 (Accession # AAC10641); Cry1Fb5 (Accession # AA013295); Cry1Fb6 (Accession # ACD50892); Cry1Fb7 (Accession # ACD50893); Cry1Ga1 (Accession # CAA80233); Cry1Ga2 (Accession # CAA70506); Cry1Gb1 (Accession # AAD10291); Cry1Gb2 (Accession # AA013756); Cry1Gc1 (Accession # AAQ52381); Cry1Ha1 (Accession # CAA80236); Cry1Hb1 (Accession # AAA79694); Cry1Hb2 (Accession # HQ439786); Cry1H-like (Accession # AAF01213); Cry1Ia1 (Accession # CAA44633); Cry1Ia2 (Accession # AAA22354); Cry1Ia3 (Accession # AAC36999); Cry1Ia4 (Accession # AAB00958); Cry1Ia5 (Accession # CAA70124); Cry1Ia6 (Accession # AAC26910); Cry1Ia7 (Accession # AAM73516); Cry1Ia8 (Accession # AAK66742); Cry1Ia9 (Accession # AAQ08616); Cry1Ia10 (Accession # AAP86782); Cryllall (Accession # CAC85964); Cry1Ia12 (Accession # AAV53390); Cry1Ia13 (Accession # ABF83202); Cry1Ia14 (Accession # ACG63871); Cry1Ia15 (Accession # FJ617445); Cry1Ia16 (Accession # FJ617448); Cry1Ia17 (Accession # GU989199); Cry1Ia18 (Accession # ADK23801); Cry1Ia19 (Accession # HQ439787); Cry1Ia20 (Accession # JQ228426); Cry1Ia2l (Accession # JQ228424); Cry1Ia22 (Accession # JQ228427); Cry1Ia23 (Accession # JQ228428); Cry1Ia24 (Accession # JQ228429); Cry1Ia25 (Accession # JQ228430); Cry1Ia26 (Accession # JQ228431); Cry1Ia27 (Accession # JQ228432); Cry1Ia28 (Accession # JQ228433); Cry1Ia29 (Accession # JQ228434); Cry1Ia30 (Accession # JQ317686); Cry1Ia3l (Accession # JX944038); Cry1Ia32 (Accession # JX944039); Cry1Ia33 (Accession # JX944040); Cry1Ib1 (Accession # AAA82114); Cry1Ib2 (Accession # ABW88019); Cry1Ib3 (Accession # ACD75515); Cry1Ib4 (Accession # HM051227); Cry1Ib5 (Accession # HM070028); Cry1Ib6 (Accession # ADK38579); Cry1Ib7 (Accession # JN571740); Cry1Ib8 (Accession # JN675714); Cry1Ib9 (Accession # JN675715); Cry1Ib10 (Accession # JN675716); Cry1Ib11 (Accession # JQ228423); Cry1Ic1 (Accession # AAC62933); Cry1Ic2 (Accession # AAE71691); Cry1Id1 (Accession # AAD44366); Cry1Id2 (Accession # JQ228422); Cry1Ie1 (Accession # AAG43526); Cry1Ie2 (Accession # HM439636); Cry1Ie3 (Accession # KC156647); Cry1Ie4 (Accession # KC156681); Cry1If1 (Accession # AAQ52382); Cry1Ig1 (Accession # KC156701); Cry1I-like (Accession # AAC31094); Cry1I-like (Accession # ABG88859); Cry1Ja1 (Accession # AAA22341); Cry1Ja2 (Accession # HM070030); Cry1Ja3 (Accession # JQ228425); Cry1Jb1 (Accession # AAA98959); Cry1Jc1 (Accession # AAC31092); Cry1Jc2 (Accession # AAQ52372); Cry1Jd1 (Accession # CAC50779); Cry1Ka1 (Accession # AAB00376); Cry1Ka2 (Accession # HQ439783); Cry1La1 (Accession # AAS60191); Cry1La2 (Accession # HM070031); Cry1Ma1 (Accession # FJ884067); Cry1Ma2 (Accession # KC156659); Cry1Na1 (Accession # KC156648); Cry1Nb1 (Accession # KC156678); Cry1-like (Accession # AAC31091); Cry2Aa1 (Accession # AAA22335); Cry2Aa2 (Accession # AAA83516); Cry2Aa3 (Accession # D86064); Cry2Aa4 (Accession # AAC04867); Cry2Aa5 (Accession # CAA10671); Cry2Aa6 (Accession # CAA10672); Cry2Aa7 (Accession # CAA10670); Cry2Aa8 (Accession # AA013734); Cry2Aa9 (Accession # AA013750); Cry2Aa10 (Accession # AAQ04263); Cry2Aa11 (Accession # AAQ52384); Cry2Aa12 (Accession # ABI83671); Cry2Aa13 (Accession # ABL01536); Cry2Aa14 (Accession # ACF04939); Cry2Aa15 (Accession # JN426947); Cry2Ab1 (Accession # AAA22342); Cry2Ab2 (Accession # CAA39075); Cry2Ab3 (Accession # AAG36762); Cry2Ab4 (Accession # AA013296); Cry2Ab5 (Accession # AAQ04609); Cry2Ab6 (Accession # AAP59457); Cry2Ab7 (Accession # AAZ66347); Cry2Ab8 (Accession # ABC95996); Cry2Ab9 (Accession # ABC74968); Cry2Ab10 (Accession # EF157306); Cry2Ab11 (Accession # CAM84575); Cry2Ab12 (Accession # ABM21764); Cry2Ab13 (Accession # ACG76120); Cry2Ab14 (Accession # ACG76121); Cry2Ab15 (Accession # HM037126); Cry2Ab16 (Accession # GQ866914); Cry2Ab17 (Accession # HQ439789); Cry2Ab18 (Accession # JN135255); Cry2Ab19 (Accession # JN135256); Cry2Ab20 (Accession # JN135257); Cry2Ab21 (Accession #JN135258); Cry2Ab22 (Accession #JN135259); Cry2Ab23 (Accession #JN135260); Cry2Ab24 (Accession # JN135261); Cry2Ab25 (Accession # JN415485); Cry2Ab26 (Accession #JN426946); Cry2Ab27 (Accession # JN415764); Cry2Ab28 (Accession #JN651494); Cry2Ac1 (Accession # CAA40536); Cry2Ac2 (Accession # AAG35410); Cry2Ac3 (Accession # AAQ52385); Cry2Ac4 (Accession # ABC95997); Cry2Ac5 (Accession # ABC74969); Cry2Ac6 (Accession # ABC74793); Cry2Ac7 (Accession # CAL18690); Cry2Ac8 (Accession # CAM09325); Cry2Ac9 (Accession # CAM09326); Cry2Ac10 (Accession # ABN15104); Cry2Ac11 (Accession # CAM83895); Cry2Ac12 (Accession # CAM83896); Cry2Ad1 (Accession # AAF09583); Cry2Ad2 (Accession # ABC86927); Cry2Ad3 (Accession # CAK29504); Cry2Ad4 (Accession # CAM32331); Cry2Ad5 (Accession # CA078739); Cry2Ae1 (Accession # AAQ52362); Cry2Af1 (Accession # AB030519); Cry2Af2 (Accession # GQ866915); Cry2Ag1 (Accession # ACH91610); Cry2Ah1 (Accession # EU939453); Cry2Ah2 (Accession # ACL80665); Cry2Ah3 (Accession # GU073380); Cry2Ah4 (Accession # KC156702); Cry2A11 (Accession # F1788388); Cry2Aj (Accession #); Cry2Ak1 (Accession # KC156660); Cry2Ba1 (Accession # KC156658); Cry3Aa1 (Accession # AAA22336); Cry3Aa2 (Accession # AAA22541); Cry3Aa3 (Accession # CAA68482); Cry3Aa4 (Accession # AAA22542); Cry3Aa5 (Accession # AAA50255); Cry3Aa6 (Accession # AAC43266); Cry3Aa7 (Accession # CAB41411); Cry3Aa8 (Accession # AAS79487); Cry3Aa9 (Accession # AAW05659); Cry3Aa10 (Accession # AAU29411); Cry3Aa11 (Accession # AAW82872); Cry3Aa12 (Accession # ABY49136); Cry3Ba1 (Accession # CAA34983); Cry3Ba2 (Accession # CAA00645); Cry3Ba3 (Accession # JQ397327); Cry3Bb1 (Accession # AAA22334); Cry3Bb2 (Accession # AAA74198); Cry3Bb3 (Accession #115475); Cry3Ca1 (Accession # CAA42469); Cry4Aa1 (Accession # CAA68485); Cry4Aa2 (Accession # BAA00179); Cry4Aa3 (Accession # CAD30148); Cry4Aa4 (Accession # AFB18317); Cry4A-like (Accession # AAY96321); Cry4Ba1 (Accession # CAA30312); Cry4Ba2 (Accession # CAA30114); Cry4Ba3 (Accession # AAA22337); Cry4Ba4 (Accession # BAA00178); Cry4Ba5 (Accession # CAD30095); Cry4Ba-like (Accession # ABC47686); Cry4Ca1 (Accession # EU646202); Cry4Cb1 (Accession # FJ403208); Cry4Cb2 (Accession # FJ597622); Cry4Cc1 (Accession # FJ403207); Cry5Aa1 (Accession # AAA67694); Cry5Ab1 (Accession # AAA67693); Cry5Ac1 (Accession #134543); Cry5Ad1 (Accession # ABQ82087); Cry5Ba1 (Accession # AAA68598); Cry5Ba2 (Accession # ABW88931); Cry5Ba3 (Accession # AFJ04417); Cry5Ca1 (Accession # HM461869); Cry5Ca2 (Accession # ZP_04123426); Cry5Da1 (Accession # HM461870); Cry5Da2 (Accession # ZP_04123980); Cry5Ea1 (Accession # HM485580); Cry5Ea2 (Accession # ZP_04124038); Cry6Aa1 (Accession # AAA22357); Cry6Aa2 (Accession # AAM46849); Cry6Aa3 (Accession # ABH03377); Cry6Ba1 (Accession # AAA22358); Cry7Aa1 (Accession # AAA22351); Cry7Ab1 (Accession # AAA21120); Cry7Ab2 (Accession # AAA21121); Cry7Ab3 (Accession # ABX24522); Cry7Ab4 (Accession # EU380678); Cry7Ab5 (Accession # ABX79555); Cry7Ab6 (Accession # ACI44005); Cry7Ab7 (Accession # ADB89216); Cry7Ab8 (Accession # GU145299); Cry7Ab9 (Accession # ADD92572); Cry7Ba1 (Accession # ABB70817); Cry7Bb1 (Accession # KC156653); Cry7Ca1 (Accession # ABR67863); Cry7Cb1 (Accession # KC156698); Cry7Da1 (Accession # ACQ99547); Cry7Da2 (Accession # HM572236); Cry7Da3 (Accession # KC156679); Cry7Ea1 (Accession # HM035086); Cry7Ea2 (Accession # HM132124); Cry7Ea3 (Accession # EEM19403); Cry7Fa1 (Accession # HM035088); Cry7Fa2 (Accession # EEM19090); Cry7Fb1 (Accession # HM572235); Cry7Fb2 (Accession # KC156682); Cry7Ga1 (Accession # HM572237); Cry7Ga2 (Accession # KC156669); Cry7Gb1 (Accession # KC156650); Cry7Gc1 (Accession # KC156654); Cry7Gd1 (Accession # KC156697); Cry7Ha1 (Accession # KC156651); Cry7Ia1 (Accession # KC156665); Cry7Ja1 (Accession # KC156671); Cry7Ka1 (Accession # KC156680); Cry7Kb1 (Accession # BAM99306); Cry7La1 (Accession # BAM99307); Cry8Aa1 (Accession # AAA21117); Cry8Ab1 (Accession # EU044830); Cry8Ac1 (Accession # KC156662); Cry8Ad1 (Accession # KC156684); Cry8Ba1 (Accession # AAA21118); Cry8Bb1 (Accession # CAD57542); Cry8Bc1 (Accession # CAD57543); Cry8Ca1 (Accession # AAA21119); Cry8Ca2 (Accession # AAR98783); Cry8Ca3 (Accession # EU625349); Cry8Ca4 (Accession # ADB54826); Cry8Da1 (Accession # BAC07226); Cry8Da2 (Accession # BD133574); Cry8Da3 (Accession # BD133575); Cry8Db1 (Accession # BAF93483); Cry8Ea1 (Accession # AAQ73470); Cry8Ea2 (Accession # EU047597); Cry8Ea3 (Accession # KC855216); Cry8Fa1 (Accession # AAT48690); Cry8Fa2 (Accession # HQ174208); Cry8Fa3 (Accession # AFH78109); Cry8Ga1 (Accession # AAT46073); Cry8Ga2 (Accession # ABC42043); Cry8Ga3 (Accession # FJ198072); Cry8Ha1 (Accession # AAW81032); Cry8Ia1 (Accession # EU381044); Cry8Ia2 (Accession # GU073381); Cry8Ia3 (Accession # HM044664); Cry8Ia4 (Accession # KC156674); Cry8Ib1 (Accession # GU325772); Cry8Ib2 (Accession # KC156677); Cry8Ja1 (Accession # EU625348); Cry8Ka1 (Accession # FJ422558); Cry8Ka2 (Accession # ACN87262); Cry8Kb1 (Accession # HM123758); Cry8Kb2 (Accession # KC156675); Cry8La1 (Accession # GU325771); Cry8Ma1 (Accession # HM044665); Cry8Ma2 (Accession # EEM86551); Cry8Ma3 (Accession # HM210574); Cry8Na1 (Accession # HM640939); Cry8Pa1 (Accession # HQ388415); Cry8Qa1 (Accession # HQ441166); Cry8Qa2 (Accession # KC152468); Cry8Ra1 (Accession # AFP87548); Cry8Sa1 (Accession # JQ740599); Cry8Ta1 (Accession # KC156673); Cry8-like (Accession # FJ770571); Cry8-like (Accession # ABS53003); Cry9Aa1 (Accession # CAA41122); Cry9Aa2 (Accession # CAA41425); Cry9Aa3 (Accession # GQ249293); Cry9Aa4 (Accession # GQ249294); Cry9Aa5 (Accession # JX174110); Cry9Aa like (Accession # AAQ52376); Cry9Ba1 (Accession # CAA52927); Cry9Ba2 (Accession # GU299522); Cry9Bb1 (Accession # AAV28716); Cry9Ca1 (Accession # CAA85764); Cry9Ca2 (Accession # AAQ52375); Cry9Da1 (Accession # BAA19948); Cry9Da2 (Accession # AAB97923); Cry9Da3 (Accession # GQ249293); Cry9Da4 (Accession # GQ249297); Cry9Db1 (Accession # AAX78439); Cry9Dc1 (Accession # KC156683); Cry9Ea1 (Accession # BAA34908); Cry9Ea2 (Accession # AAO12908); Cry9Ea3 (Accession # ABM21765); Cry9Ea4 (Accession # ACE88267); Cry9Ea5 (Accession # ACF04743); Cry9Ea6 (Accession # ACG63872); Cry9Ea7 (Accession # FJ380927); Cry9Ea8 (Accession # GQ249292); Cry9Ea9 (Accession # JN651495); Cry9Eb1 (Accession # CAC50780); Cry9Eb2 (Accession # GQ249298); Cry9Eb3 (Accession # KC156646); Cry9Ec1 (Accession # AAC63366); Cry9Ed1 (Accession # AAX78440); Cry9Ee1 (Accession # GQ249296); Cry9Ee2 (Accession # KC156664); Cry9Fa1 (Accession # KC156692); Cry9Ga1 (Accession # KC156699); Cry9-like (Accession # AAC63366); Cry10Aa1 (Accession # AAA22614); Cry10Aa2 (Accession # E00614); Cry10Aa3 (Accession # CAD30098); Cry10Aa4 (Accession # AFB18318); Cry10A-like (Accession # DQ167578); Cry11Aa1 (Accession # AAA22352); Cry11Aa2 (Accession # AAA22611); Cry11Aa3 (Accession # CAD30081); Cry11Aa4 (Accession # AFB18319); Cry11Aa-like (Accession # DQ166531); Cry11Ba1 (Accession # CAA60504); Cry11Bb1 (Accession # AAC97162); Cry11Bb2 (Accession # HM068615); Cry12Aa1 (Accession # AAA22355); Cry13Aa1 (Accession # AAA22356); Cry14Aa1 (Accession # AAA21516); Cry14Ab1 (Accession # KC156652); Cry15Aa1 (Accession # AAA22333); Cry16Aa1 (Accession # CAA63860); Cry17Aa1 (Accession # CAA67841); Cry18Aa1 (Accession # CAA67506); Cry18Ba1 (Accession # AAF89667); Cry18Ca1 (Accession # AAF89668); Cry19Aa1 (Accession # CAA68875); Cry19Ba1 (Accession # BAA32397); Cry19Ca1 (Accession # AFM37572); Cry20Aa1 (Accession # AAB93476); Cry20Ba1 (Accession # ACS93601); Cry20Ba2 (Accession # KC156694); Cry20-like (Accession # GQ144333); Cry21Aa1 (Accession #132932); Cry21Aa2 (Accession #166477); Cry21Ba1 (Accession # BAC06484); Cry21Ca1 (Accession # JF521577); Cry21Ca2 (Accession # KC156687); Cry21Da1 (Accession # JF521578); Cry22Aa1 (Accession #134547); Cry22Aa2 (Accession # CAD43579); Cry22Aa3 (Accession # ACD93211); Cry22Ab1 (Accession # AAK50456); Cry22Ab2 (Accession # CAD43577); Cry22Ba1 (Accession # CAD43578); Cry22Bb1 (Accession # KC156672); Cry23Aa1 (Accession # AAF76375); Cry24Aa1 (Accession # AAC61891); Cry24Ba1 (Accession # BAD32657); Cry24Ca1 (Accession # CAJ43600); Cry25Aa1 (Accession # AAC61892); Cry26Aa1 (Accession # AAD25075); Cry27Aa1 (Accession # BAA82796); Cry28Aa1 (Accession # AAD24189); Cry28Aa2 (Accession # AAG00235); Cry29Aa1 (Accession # CAC80985); Cry30Aa1 (Accession # CAC80986); Cry30Ba1 (Accession # BAD00052); Cry30Ca1 (Accession # BAD67157); Cry30Ca2 (Accession # ACU24781); Cry30Da1 (Accession # EF095955); Cry30Db1 (Accession # BAE80088); Cry30Ea1 (Accession # ACC95445); Cry30Ea2 (Accession # FJ499389); Cry30Fa1 (Accession # ACI22625); Cry30Ga1 (Accession # ACG60020); Cry30Ga2 (Accession # HQ638217); Cry31Aa1 (Accession # BAB11757); Cry31Aa2 (Accession # AAL87458); Cry31Aa3 (Accession # BAE79808); Cry31Aa4 (Accession # BAF32571); Cry31Aa5 (Accession # BAF32572); Cry31Aa6 (Accession # BAI44026); Cry31Ab1 (Accession # BAE79809); Cry31Ab2 (Accession # BAF32570); Cry31Ac1 (Accession # BAF34368); Cry31Ac2 (Accession # AB731600); Cry31Ad1 (Accession # BAI44022); Cry32Aa1 (Accession # AAG36711); Cry32Aa2 (Accession # GU063849); Cry32Ab1 (Accession # GU063850); Cry32Ba1 (Accession # BAB78601); Cry32Ca1 (Accession # BAB78602); Cry32Cb1 (Accession # KC156708); Cry32Da1 (Accession # BAB78603); Cry32Ea1 (Accession # GU324274); Cry32Ea2 (Accession # KC156686); Cry32Eb1 (Accession # KC156663); Cry32Fa1 (Accession # KC156656); Cry32Ga1 (Accession # KC156657); Cry32Ha1 (Accession # KC156661); Cry32Hb1 (Accession # KC156666); Cry32Ia1 (Accession # KC156667); Cry32Ja1 (Accession # KC156685); Cry32Ka1 (Accession # KC156688); Cry32La1 (Accession # KC156689); Cry32Ma1 (Accession # KC156690); Cry32Mb1 (Accession # KC156704); Cry32Na1 (Accession # KC156691); Cry32Oa1 (Accession # KC156703); Cry32Pa1 (Accession # KC156705); Cry32Qa1 (Accession # KC156706); Cry32Ra1 (Accession # KC156707); Cry32Sa1 (Accession # KC156709); Cry32Ta1 (Accession # KC156710); Cry32Ua1 (Accession # KC156655); Cry33Aa1 (Accession # AAL26871); Cry34Aa1 (Accession # AAG50341); Cry34Aa2 (Accession # AAK64560); Cry34Aa3 (Accession # AAT29032); Cry34Aa4 (Accession # AAT29030); Cry34Ab1 (Accession # AAG41671); Cry34Ac1 (Accession # AAG50118); Cry34Ac2 (Accession # AAK64562); Cry34Ac3 (Accession # AAT29029); Cry34Ba1 (Accession # AAK64565); Cry34Ba2 (Accession # AAT29033); Cry34Ba3 (Accession # AAT29031); Cry35Aa1 (Accession # AAG50342); Cry35Aa2 (Accession # AAK64561); Cry35Aa3 (Accession # AAT29028); Cry35Aa4 (Accession # AAT29025); Cry35Ab1 (Accession # AAG41672); Cry35Ab2 (Accession # AAK64563); Cry35Ab3 (Accession # AY536891); Cry35Ac1 (Accession # AAG50117); Cry35Ba1 (Accession # AAK64566); Cry35Ba2 (Accession # AAT29027); Cry35Ba3 (Accession # AAT29026); Cry36Aa1 (Accession # AAK64558); Cry37Aa1 (Accession # AAF76376); Cry38Aa1 (Accession # AAK64559); Cry39Aa1 (Accession # BAB72016); Cry40Aa1 (Accession # BAB72018); Cry40Ba1 (Accession # BAC77648); Cry40Ca1 (Accession # EU381045); Cry40Da1 (Accession # ACF15199); Cry41Aa1 (Accession # BAD35157); Cry41Ab1 (Accession # BAD35163); Cry41Ba1 (Accession # HM461871); Cry41Ba2 (Accession # ZP_04099652); Cry42Aa1 (Accession # BAD35166); Cry43Aa1 (Accession # BAD15301); Cry43Aa2 (Accession # BAD95474); Cry43Ba1 (Accession # BAD15303); Cry43Ca1 (Accession # KC156676); Cry43Cb1 (Accession # KC156695); Cry43Cc1 (Accession # KC156696); Cry43-like (Accession # BAD15305); Cry44Aa (Accession # BAD08532); Cry45Aa (Accession # BAD22577); Cry46Aa (Accession # BAC79010); Cry46Aa2 (Accession # BAG68906); Cry46Ab (Accession # BAD35170); Cry47Aa (Accession # AAY24695); Cry48Aa (Accession # CAJ18351); Cry48Aa2 (Accession # CAJ86545); Cry48Aa3 (Accession # CAJ86546); Cry48Ab (Accession # CAJ86548); Cry48Ab2 (Accession # CAJ86549); Cry49Aa (Accession # CAH56541); Cry49Aa2 (Accession # CAJ86541); Cry49Aa3 (Accession # CAJ86543); Cry49Aa4 (Accession # CAJ86544); Cry49Ab1 (Accession # CAJ86542); Cry50Aa1 (Accession # BAE86999); Cry50Ba1 (Accession # GU446675); Cry50Ba2 (Accession # GU446676); Cry51Aa1 (Accession # ABI14444); Cry51Aa2 (Accession # GU570697); Cry52Aa1 (Accession # EF613489); Cry52Ba1 (Accession # FJ361760); Cry53Aa1 (Accession # EF633476); Cry53Ab1 (Accession # FJ361759); Cry54Aa1 (Accession # ACA52194); Cry54Aa2 (Accession # GQ140349); Cry54Ba1 (Accession # GU446677); Cry55Aa1 (Accession # ABW88932); Cry54Ab1 (Accession # JQ916908); Cry55Aa2 (Accession # AAE33526); Cry56Aa1 (Accession # ACU57499); Cry56Aa2 (Accession # GQ483512); Cry56Aa3 (Accession # JX025567); Cry57Aa1 (Accession # ANC87261); Cry58Aa1 (Accession # ANC87260); Cry59Ba1 (Accession # JN790647); Cry59Aa1 (Accession # ACR43758); Cry60Aa1 (Accession # ACU24782); Cry60Aa2 (Accession # EA057254); Cry60Aa3 (Accession # EEM99278); Cry60Ba1 (Accession # GU810818); Cry60Ba2 (Accession # EA057253); Cry60Ba3 (Accession # EEM99279); Cry61Aa1 (Accession # HM035087); Cry61Aa2 (Accession # HM132125); Cry61Aa3 (Accession # EEM19308); Cry62Aa1 (Accession # HM054509); Cry63Aa1 (Accession # BAI44028); Cry64Aa1 (Accession # BAJ05397); Cry65Aa1 (Accession # HM461868); Cry65Aa2 (Accession # ZP_04123838); Cry66Aa1 (Accession # HM485581); Cry66Aa2 (Accession # ZP_04099945); Cry67Aa1 (Accession # HM485582); Cry67Aa2 (Accession # ZP_04148882); Cry68Aa1 (Accession # HQ113114); Cry69Aa1 (Accession # HQ401006); Cry69Aa2 (Accession # JQ821388); Cry69Ab1 (Accession # JN209957); Cry70Aa1 (Accession # JN646781); Cry70Ba1 (Accession # AD051070); Cry70Bb1 (Accession # EEL67276); Cry71Aa1 (Accession # JX025568); Cry72Aa1 (Accession # JX025569).

[0224] Examples of δ-endotoxins also include but are not limited to Cry1A proteins of U.S. Pat. Nos. 5,880,275 and 7,858,849; a DIG-3 or DIG-11 toxin (N-terminal deletion of α-helix 1 and/or α-helix 2 variants of Cry proteins such as Cry1A) of U.S. Pat. Nos. 8,304,604 and 8,304,605, Cry1B of U.S. patent application Ser. No. 10/525,318; Cry1C of U.S. Pat. No. 6,033,874; Cry1F of U.S. Pat. Nos. 5,188,960, 6,218,188; Cry1A/F chimeras of U.S. Pat. Nos. 7,070,982; 6,962,705 and 6,713,063); a Cry2 protein such as Cry2Ab protein of U.S. Pat. No. 7,064,249); a Cry3A protein including but not limited to an engineered hybrid insecticidal protein (eHIP) created by fusing unique combinations of variable regions and conserved blocks of at least two different Cry proteins (US Patent Application Publication Number 2010/0017914); a Cry4 protein; a Cry5 protein; a Cry6 protein; Cry8 proteins of U.S. Pat. Nos. 7,329,736, 7,449,552, 7,803,943, 7,476,781, 7,105,332, 7,378,499 and 7,462,760; a Cry9 protein such as such as members of the Cry9A, Cry9B, Cry9C, Cry9D, Cry9E, and Cry9F families; a Cry15 protein of Naimov, et al., (2008) Applied and Environmental Microbiology 74:7145-7151; a Cry22, a Cry34Ab1 protein of U.S. Pat. Nos. 6,127,180, 6,624,145 and 6,340,593; a CryET33 and CryET34 protein of U.S. Pat. Nos. 6,248,535, 6,326,351, 6,399,330, 6,949,626, 7,385,107 and 7,504,229; a CryET33 and CryET34 homologs of US Patent Publication Number 2006/0191034, 2012/0278954, and PCT Publication Number WO 2012/139004; a Cry35Ab1 protein of U.S. Pat. Nos. 6,083,499, 6,548,291 and 6,340,593; a Cry46 protein, a Cry 51 protein, a Cry binary toxin; a TIC901 or related toxin; TIC807 of US 2008/0295207; ET29, ET37, TIC809, TIC810, TIC812, TIC127, TIC128 of PCT US 2006/033867; TIC3131, TIC 3400, and TIC3407 of US Patent Application Publication Number 2015/0047076; AXMI-027, AXMI-036, and AXMI-038 of U.S. Pat. No. 8,236,757; AXMI-031, AXMI-039, AXMI-040, AXMI-049 of U.S. Pat. No. 7,923,602; AXMI-018, AXMI-020, and AXMI-021 of WO 2006/083891; AXMI-010 of WO 2005/038032; AXMI-003 of WO 2005/021585; AXMI-008 of US 2004/0250311; AXMI-006 of US 2004/0216186; AXMI-007 of US 2004/0210965; AXMI-009 of US 2004/0210964; AXMI-014 of US 2004/0197917; AXMI-004 of US 2004/0197916; AXMI-028 and AXMI-029 of WO 2006/119457; AXMI-007, AXMI-008, AXMI-0080rf2, AXMI-009, AXMI-014 and AXMI-004 of WO 2004/074462; AXMI-150 of U.S. Pat. No. 8,084,416; AXMI-205 of US20110023184; AXMI-011, AXMI-012, AXMI-013, AXMI-015, AXMI-019, AXMI-044, AXMI-037, AXMI-043, AXMI-033, AXMI-034, AXMI-022, AXMI-023, AXMI-041, AXMI-063, and AXMI-064 of US 2011/0263488; AXMI-R1 and related proteins of US 2010/0197592; AXMI221Z, AXMI222z, AXMI223z, AXMI224z and AXMI225z of WO 2011/103248; AXMI218, AXMI219, AXMI220, AXMI226, AXMI227, AXMI228, AXMI229, AXMI230, and AXMI231 of WO11/103247; AXMI-115, AXMI-113, AXMI-005, AXMI-163 and AXMI-184 of U.S. Pat. No. 8,334,431; AXMI-001, AXMI-002, AXMI-030, AXMI-035, and AXMI-045 of US 2010/0298211; AXMI-066 and AXMI-076 of US20090144852; AXMI128, AXMI130, AXMI131, AXMI133, AXMI140, AXMI141, AXMI142, AXMI143, AXMI144, AXMI146, AXMI148, AXMI149, AXMI152, AXMI153, AXMI154, AXMI155, AXMI156, AXMI157, AXMI158, AXMI162, AXMI165, AXMI166, AXMI167, AXMI168, AXMI169, AXMI170, AXMI171, AXMI172, AXMI173, AXMI174, AXMI175, AXMI176, AXMI177, AXMI178, AXMI179, AXMI180, AXMI181, AXMI182, AXMI185, AXMI186, AXMI187, AXMI188, AXMI189 of U.S. Pat. No. 8,318,900; AXMI079, AXMI080, AXMI081, AXMI082, AXMI091, AXMI092, AXMI096, AXMI097, AXMI098, AXMI099, AXMI100, AXMI101, AXMI102, AXMI103, AXMI104, AXMI107, AXMI108, AXMI109, AXMI110, AXMI111, AXMI112, AXMI114, AXMI116, AXMI117, AXMI118, AXMI119, AXMI120, AXMI121, AXMI122, AXMI123, AXMI124, AXMI1257, AXMI1268, AXMI127, AXMI129, AXMI164, AXMI151, AXMI161, AXMI183, AXMI132, AXMI138, AXMI137 of US 2010/0005543; and Cry proteins such as Cry1A and Cry3A having modified proteolytic sites of U.S. Pat. No. 8,319,019; and a Cry1Ac, Cry2Aa and Cry1Ca toxin protein from Bacillus thuringiensis strain VBTS 2528 of US Patent Application Publication Number 2011/0064710. Other Cry proteins are well known to one skilled in the art (see, Crickmore, et al., “Bacillus thuringiensis toxin nomenclature” (2011), at lifesci.sussex.ac.uk/home/Neil_Crickmore/Bt/ which can be accessed on the world-wide web using the “www” prefix). The insecticidal activity of Cry proteins is well known to one skilled in the art (for review, see, van Frannkenhuyzen, (2009) 1 Invert. Path. 101:1-16). The use of Cry proteins as transgenic plant traits is well known to one skilled in the art and Cry-transgenic plants including but not limited to Cry1Ac, Cry1Ac+Cry2Ab, Cry1Ab, Cry1A.105, Cry1F, Cry1Fa2, Cry1F+Cry1Ac, Cry2Ab, Cry3A, mCry3A, Cry3Bb1, Cry34Ab1, Cry35Ab1, Vip3A, mCry3A, Cry9c and CBI-Bt have received regulatory approval (see, Sanahuj a, (2011) Plant Biotech Journal 9:283-300 and the CERA (2010) GM Crop Database Center for Environmental Risk Assessment (CERA), ILSI Research Foundation, Washington D.C. at cera-gmc.org/index.php?action=gm_crop_database which can be accessed on the world-wide web using the “www” prefix). More than one pesticidal proteins well known to one skilled in the art can also be expressed in plants such as Vip3Ab & Cry1Fa (US2012/0317682), Cry1BE & Cry1F (US2012/0311746), Cry1CA & Cry1AB (US2012/0311745), Cry1F & CryCa (US2012/0317681), Cry1DA & Cry1BE (US2012/0331590), Cry1DA & Cry1Fa (US2012/0331589), Cry1AB & Cry1BE (US2012/0324606), and Cry1Fa & Cry2Aa, Cry1I or Cry1E (US2012/0324605)); Cry34Ab/35Ab and Cry6Aa (US20130167269); Cry34Ab/VCry35Ab & Cry3Aa (US20130167268); Cry3A and Cry1Ab or Vip3Aa (US20130116170); and Cry1F, Cry34Ab1, and Cry35Ab1 (PCT/US2010/060818). Pesticidal proteins also include insecticidal lipases including lipid acyl hydrolases of U.S. Pat. No. 7,491,869, and cholesterol oxidases such as from Streptomyces (Purcell et al. (1993) Biochem Biophys Res Commun 15:1406-1413). Pesticidal proteins also include VIP (vegetative insecticidal proteins) toxins of U.S. Pat. Nos. 5,877,012, 6,107,279, 6,137,033, 7,244,820, 7,615,686, and 8,237,020, and the like. Other VIP proteins are well known to one skilled in the art (see, lifesci.sussex.ac.uk/home/Neil_Crickmore/Bt/vip.html which can be accessed on the world-wide web using the “www” prefix). Pesticidal proteins also include toxin complex (TC) proteins, obtainable from organisms such as Xenorhabdus, Photorhabdus and Paenibacillus (see, U.S. Pat. Nos. 7,491,698 and 8,084,418). Some TC proteins have “stand alone” insecticidal activity and other TC proteins enhance the activity of the stand-alone toxins produced by the same given organism. The toxicity of a “stand-alone” TC protein (from Photorhabdus, Xenorhabdus or Paenibacillus, for example) can be enhanced by one or more TC protein “potentiators” derived from a source organism of a different genus. There are three main types of TC proteins. As referred to herein, Class A proteins (“Protein A”) are stand-alone toxins. Class B proteins (“Protein B”) and Class C proteins (“Protein C”) enhance the toxicity of Class A proteins. Examples of Class A proteins are TcbA, TcdA, XptA1 and XptA2. Examples of Class B proteins are TcaC, TcdB, XptB1Xb and XptC1Wi. Examples of Class C proteins are TccC, XptC1Xb and XptB1Wi. Pesticidal proteins also include spider, snake and scorpion venom proteins. Examples of spider venom peptides include but are not limited to lycotoxin-1 peptides and mutants thereof (U.S. Pat. No. 8,334,366).

[0225] Use in Pesticidal Control

[0226] General methods for employing strains comprising a nucleic acid sequence of the embodiments or a variant thereof, in pesticide control or in engineering other organisms as pesticidal agents are known in the art. See, for example U.S. Pat. No. 5,039,523 and EP 0480762A2.

[0227] Microorganism hosts that are known to occupy the “phytosphere” (phylloplane, phyllosphere, rhizosphere, and/or rhizoplana) of one or more crops of interest may be selected. These microorganisms are selected so as to be capable of successfully competing in the particular environment with the wild-type microorganisms, provide for stable maintenance and expression of the gene expressing the IPD079 polypeptide and desirably provide for improved protection of the pesticide from environmental degradation and inactivation.

[0228] Alternatively, the IPD079 polypeptides are produced by introducing a heterologous gene into a cellular host. Expression of the heterologous gene results, directly or indirectly, in the intracellular production and maintenance of the pesticide. These cells are then treated under conditions that prolong the activity of the toxin produced in the cell when the cell is applied to the environment of target pest(s). The resulting product retains the toxicity of the toxin. These naturally encapsulated IPD079 polypeptides may then be formulated in accordance with conventional techniques for application to the environment hosting a target pest, e.g., soil, water, and foliage of plants. See, for example EPA 0192319, and the references cited therein.

[0229] Pesticidal Compositions

[0230] In some embodiments the plant derived perforin can be applied in the form of compositions and can be applied to the crop area or plant to be treated, simultaneously or in succession, with other compounds. These compounds can be fertilizers, weed killers, Cryoprotectants, surfactants, detergents, pesticidal soaps, dormant oils, polymers, and/or time-release or biodegradable carrier formulations that permit long-term dosing of a target area following a single application of the formulation. They can also be selective herbicides, chemical insecticides, virucides, microbicides, amoebicides, pesticides, fungicides, bacteriocides, nematocides, molluscicides or mixtures of several of these preparations, if desired, together with further agriculturally acceptable carriers, surfactants or application-promoting adjuvants customarily employed in the art of formulation. Suitable carriers and adjuvants can be solid or liquid and correspond to the substances ordinarily employed in formulation technology, e.g. natural or regenerated mineral substances, solvents, dispersants, wetting agents, tackifiers, binders or fertilizers. Likewise the formulations may be prepared into edible “baits” or fashioned into pest “traps” to permit feeding or ingestion by a target pest of the pesticidal formulation.

[0231] Methods of applying an active ingredient or an agrochemical composition that contains a silencing element at least one of plant derived perforin of the disclosure including but not limited to the IPD079 polypeptide produced by the bacterial strains include leaf application, seed coating and soil application. The number of applications and the rate of application depend on the intensity of infestation by the corresponding pest.

[0232] The composition may be formulated as a powder, dust, pellet, granule, spray, emulsion, colloid, solution or such like, and may be prepared by such conventional means as desiccation, lyophilization, homogenation, extraction, filtration, centrifugation, sedimentation or concentration of a culture of cells comprising the polypeptide. In all such compositions that contain at least one such pesticidal polypeptide, the polypeptide may be present in a concentration of from about 1% to about 99% by weight. “About” with respect to % by weight means±0.5%. Lepidopteran, Dipteran, Heteropteran, nematode, Hemipteran or Coleopteran pests may be killed or reduced in numbers in a given area by the methods of the disclosure or may be prophylactically applied to an environmental area to prevent infestation by a susceptible pest. Preferably the pest ingests or is contacted with, a pesticidally-effective amount of the polypeptide. “Pesticidally-effective amount” as used herein refers to an amount of the pesticide that is able to bring about death to at least one pest or to noticeably reduce pest growth, feeding or normal physiological development. This amount will vary depending on such factors as, for example, the specific target pests to be controlled, the specific environment, location, plant, crop or agricultural site to be treated, the environmental conditions and the method, rate, concentration, stability, and quantity of application of the pesticidally-effective polypeptide composition. The formulations may also vary with respect to climatic conditions, environmental considerations, and/or frequency of application and/or severity of pest infestation.

[0233] The pesticide compositions described may be made by formulating the bacterial cell, Crystal and/or spore suspension or isolated protein component with the desired agriculturally-acceptable carrier. The compositions may be formulated prior to administration in an appropriate means such as lyophilized, freeze-dried, desiccated or in an aqueous carrier, medium or suitable diluent, such as saline or other buffer. The formulated compositions may be in the form of a dust or granular material or a suspension in oil (vegetable or mineral) or water or oil/water emulsions or as a wettable powder or in combination with any other carrier material suitable for agricultural application. Suitable agricultural carriers can be solid or liquid and are well known in the art. The term “agriculturally-acceptable carrier” covers all adjuvants, inert components, dispersants, surfactants, tackifiers, binders, etc. that are ordinarily used in pesticide formulation technology; these are well known to those skilled in pesticide formulation. The formulations may be mixed with one or more solid or liquid adjuvants and prepared by various means, e.g., by homogeneously mixing, blending and/or grinding the pesticidal composition with suitable adjuvants using conventional formulation techniques. Suitable formulations and application methods are described in U.S. Pat. No. 6,468,523, herein incorporated by reference. The seeds or plants can also be treated with one or more chemical compositions, including one or more herbicide, insecticides or fungicides. Exemplary chemical compositions include: Fruits/Vegetables Herbicides: Atrazine, Bromacil, Diuron, Glyphosate, Linuron, Metribuzin, Simazine, Trifluralin, Fluazifop, Glufosinate, Halo sulfuron Gowan, Paraquat, Propyzamide, Sethoxydim, Butafenacil, Halosulfuron, Indaziflam; Fruits/Vegetables Insecticides: Aldicarb, Bacillus thuriengiensis, Carbaryl, Carbofuran, Chlorpyrifos, Cypermethrin, Deltamethrin, Diazinon, Malathion, Abamectin, Cyfluthrin/beta-cyfluthrin, Esfenvalerate, Lambda-cyhalothrin, Acequinocyl, Bifenazate, Methoxyfenozide, Novaluron, Chromafenozide, Thiacloprid, Dinotefuran, FluaCrypyrim, Tolfenpyrad, Clothianidin, Spirodiclofen, Gamma-cyhalothrin, Spiromesifen, Spinosad, Rynaxypyr, Cyazypyr, Spinoteram, Triflumuron, Spirotetramat, Imidacloprid, Flubendiamide, Thiodicarb, Metaflumizone, Sulfoxaflor, Cyflumetofen, Cyanopyrafen, Imidacloprid, Clothianidin, Thiamethoxam, Spinotoram, Thiodicarb, Flonicamid, Methiocarb, Emamectin-benzoate, Indoxacarb, Forthiazate, Fenamiphos, Cadusaphos, Pyriproxifen, Fenbutatin-oxid, Hexthiazox, Methomyl, 4-[[(6-Chlorpyridin-3-yl)methyl] (2,2-difluorethyl)amino] furan-2(5H)-on; Fruits/Vegetables Fungicides: Carbendazim, Chlorothalonil, EBDCs, Sulphur, Thiophanate-methyl, Azoxystrobin, Cymoxanil, Fluazinam, Fosetyl, Iprodione, Kresoxim-methyl, Metalaxyl/mefenoxam, Trifloxystrobin, Ethaboxam, Iprovalicarb, Trifloxystrobin, Fenhexamid, Oxpoconazole fumarate, Cyazofamid, Fenamidone, Zoxamide, Picoxystrobin, Pyraclostrobin, Cyflufenamid, Boscalid; Cereals Herbicides: Isoproturon, Bromoxynil, loxynil, Phenoxies, Chlorsulfuron, Clodinafop, Diclofop, Diflufenican, Fenoxaprop, Florasulam, Fluoroxypyr, Metsulfuron, Triasulfuron, Flucarbazone, lodosulfuron, Propoxycarbazone, Picolinafen, Mesosulfuron, Beflubutamid, Pinoxaden, Amidosulfuron, Thifensulfuron Methyl, Tribenuron, Flupyrsulfuron, Sulfosulfuron, Pyrasulfotole, Pyroxsulam, Flufenacet, Tralkoxydim, Pyroxasulfon; Cereals Fungicides: Carbendazim, Chlorothalonil, Azoxystrobin, Cyproconazole, Cyprodinil, Fenpropimorph, Epoxiconazole, Kresoxim-methyl, Quinoxyfen, Tebuconazole, Trifloxystrobin, Simeconazole, Picoxystrobin, Pyraclostrobin, Dimoxystrobin, Prothioconazole, Fluoxastrobin; Cereals Insecticides: Dimethoate, Lambda-cyhalthrin, Deltamethrin, alpha-Cypermethrin, β-cyfluthrin, Bifenthrin, Imidacloprid, Clothianidin, Thiamethoxam, Thiacloprid, Acetamiprid, Dinetofuran, Clorphyriphos, Metamidophos, Oxidemethon-methyl, Pirimicarb, Methiocarb; Maize Herbicides: Atrazine, Alachlor, Bromoxynil, Acetochlor, Dicamba, Clopyralid, (S-) Dimethenamid, Glufosinate, Glyphosate, Isoxaflutole, (S-) Metolachlor, Mesotrione, Nicosulfuron, Primisulfuron, Rimsulfuron, Sulcotrione, Foramsulfuron, Topramezone, Tembotrione, Saflufenacil, Thiencarbazone, Flufenacet, Pyroxasulfon; Maize Insecticides: Carbofuran, Chlorpyrifos, Bifenthrin, Fipronil, Imidacloprid, Lambda-Cyhalothrin, Tefluthrin, Terbufos, Thiamethoxam, Clothianidin, Spiromesifen, Flubendiamide, Triflumuron, Rynaxypyr, Deltamethrin, Thiodicarb, β-Cyfluthrin, Cypermethrin, Bifenthrin, Lufenuron, Triflumoron, Tefluthrin, Tebupirimphos, Ethiprole, Cyazypyr, Thiacloprid, Acetamiprid, Dinetofuran, Avermectin, Methiocarb, Spirodiclofen, Spirotetramat; Maize Fungicides: Fenitropan, Thiram, Prothioconazole, Tebuconazole, Trifloxystrobin; Rice Herbicides: Butachlor, Propanil, Azimsulfuron, Bensulfuron, Cyhalofop, Daimuron, Fentrazamide, Imazosulfuron, Mefenacet, Oxaziclomefone, Pyrazosulfuron, Pyributicarb, Quinclorac, Thiobencarb, Indanofan, Flufenacet, Fentrazamide, Halosulfuron, Oxaziclomefone, Benzobicyclon, Pyriftalid, Penoxsulam, Bispyribac, Oxadiargyl, Ethoxysulfuron, Pretilachlor, Mesotrione, Tefuryltrione, Oxadiazone, Fenoxaprop, Pyrimisulfan; Rice Insecticides: Diazinon, Fenitrothion, Fenobucarb, Monocrotophos, Benfuracarb, Buprofezin, Dinotefuran, Fipronil, Imidacloprid, Isoprocarb, Thiacloprid, Chromafenozide, Thiacloprid, Dinotefuran, Clothianidin, Ethiprole, Flubendiamide, Rynaxypyr, Deltamethrin, Acetamiprid, Thiamethoxam, Cyazypyr, Spinosad, Spinotoram, Emamectin-Benzoate, Cypermethrin, Chlorpyriphos, Cartap, Methamidophos, Etofenprox, Triazophos, 4-[[(6-Chlorpyridin-3-yl)methyl](2,2-difluorethyl)amino]furan-2(5H)-on, Carbofuran, Benfuracarb; Rice Fungicides: Thiophanate-methyl, Azoxystrobin, Carpropamid, Edifenphos, Ferimzone, Iprobenfos, Isoprothiolane, Pencycuron, Probenazole, Pyroquilon, Tricyclazole, Trifloxystrobin, Diclocymet, Fenoxanil, Simeconazole, Tiadinil; Cotton Herbicides: Diuron, Fluometuron, MSMA, Oxyfluorfen, Prometryn, Trifluralin, Carfentrazone, Clethodim, Fluazifop-butyl, Glyphosate, Norflurazon, Pendimethalin, Pyrithiobac-sodium, Trifloxysulfuron, Tepraloxydim, Glufosinate, Flumioxazin, Thidiazuron; Cotton Insecticides: Acephate, Aldicarb, Chlorpyrifos, Cypermethrin, Deltamethrin, Malathion, Monocrotophos, Abamectin, Acetamiprid, Emamectin Benzoate, Imidacloprid, Indoxacarb, Lambda-Cyhalothrin, Spinosad, Thiodicarb, Gamma-Cyhalothrin, Spiromesifen, Pyridalyl, Flonicamid, Flubendiamide, Triflumuron, Rynaxypyr, Beta-Cyfluthrin, Spirotetramat, Clothianidin, Thiamethoxam, Thiacloprid, Dinetofuran, Flubendiamide, Cyazypyr, Spinosad, Spinotoram, gamma Cyhalothrin, 4-[[(6-Chlorpyridin-3-yl)methyl](2,2-difluorethyl)amino]furan-2(5H)-on, Thiodicarb, Avermectin, Flonicamid, Pyridalyl, Spiromesifen, Sulfoxaflor, Profenophos, Thriazophos, Endosulfan; Cotton Fungicides: Etridiazole, Metalaxyl, Quintozene; Soybean Herbicides: Alachlor, Bentazone, Trifluralin, Chlorimuron-Ethyl, Cloransulam-Methyl, Fenoxaprop, Fomesafen, Fluazifop, Glyphosate, Imazamox, Imazaquin, Imazethapyr, (S-) Metolachlor, Metribuzin, Pendimethalin, Tepraloxydim, Glufosinate; Soybean Insecticides: Lambda-cyhalothrin, Methomyl, Parathion, Thiocarb, Imidacloprid, Clothianidin, Thiamethoxam, Thiacloprid, Acetamiprid, Dinetofuran, Flubendiamide, Rynaxypyr, Cyazypyr, Spinosad, Spinotoram, Emamectin-Benzoate, Fipronil, Ethiprole, Deltamethrin, β-Cyfluthrin, gamma and lambda Cyhalothrin, 4-[[(6-Chlorpyridin-3-yl)methyl](2,2-difluorethyl)amino]furan-2(5H)-on, Spirotetramat, Spinodiclofen, Triflumuron, Flonicamid, Thiodicarb, beta-Cyfluthrin; Soybean Fungicides: Azoxystrobin, Cyproconazole, Epoxiconazole, Flutriafol, Pyraclostrobin, Tebuconazole, Trifloxystrobin, Prothioconazole, Tetraconazole; Sugarbeet Herbicides: Chloridazon, Desmedipham, Ethofumesate, Phenmedipham, Triallate, Clopyralid, Fluazifop, Lenacil, Metamitron, Quinmerac, Cycloxydim, Triflusulfuron, Tepraloxydim, Quizalofop; Sugarbeet Insecticides: Imidacloprid, Clothianidin, Thiamethoxam, Thiacloprid, Acetamiprid, Dinetofuran, Deltamethrin, β-Cyfluthrin, gamma/lambda Cyhalothrin, 4-[[(6-Chlorpyridin-3-yl)methyl](2,2-difluorethyl)amino]furan-2(5H)-on, Tefluthrin, Rynaxypyr, Cyaxypyr, Fipronil, Carbofuran; Canola Herbicides: Clopyralid, Diclofop, Fluazifop, Glufosinate, Glyphosate, Metazachlor, Trifluralin Ethametsulfuron, Quinmerac, Quizalofop, Clethodim, Tepraloxydim; Canola Fungicides: Azoxystrobin, Carbendazim, Fludioxonil, Iprodione, Prochloraz, Vinclozolin; Canola Insecticides: Carbofuran organophosphates, Pyrethroids, Thiacloprid, Deltamethrin, Imidacloprid, Clothianidin, Thiamethoxam, Acetamiprid, Dinetofuran, β-Cyfluthrin, gamma and lambda Cyhalothrin, tau-Fluvaleriate, Ethiprole, Spinosad, Spinotoram, Flubendiamide, Rynaxypyr, Cyazypyr, 4-[[(6-Chlorpyridin-3-yl)methyl](2,2-difluorethyl)amino] furan-2(5H)-on.

[0234] In some embodiments the herbicide is Atrazine, Bromacil, Diuron, Chlorsulfuron, Metsulfuron, Thifensulfuron Methyl, Tribenuron, Acetochlor, Dicamba, Isoxaflutole, Nicosulfuron, Rimsulfuron, Pyrithiobac-sodium, Flumioxazin, Chlorimuron-Ethyl, Metribuzin, Quizalofop, S-metolachlor, Hexazinne or combinations thereof.

[0235] In some embodiments the insecticide is Esfenvalerate, Chlorantraniliprole, Methomyl, Indoxacarb, Oxamyl or combinations thereof.

[0236] Pesticidal and Insecticidal Activity

[0237] “Pest” includes but is not limited to, insects, fungi, bacteria, nematodes, mites, ticks and the like. Insect pests include insects selected from the orders Coleoptera, Diptera, Hymenoptera, Lepidoptera, Mallophaga, Homoptera, Hemiptera Orthroptera, Thysanoptera, Dermaptera, Isoptera, Anoplura, Siphonaptera, Trichoptera, etc., particularly Lepidoptera and Coleoptera.

[0238] Those skilled in the art will recognize that not all compounds are equally effective against all pests. Compounds of the embodiments display activity against insect pests, which may include economically important agronomic, forest, greenhouse, nursery ornamentals, food and fiber, public and animal health, domestic and commercial structure, household and stored product pests.

[0239] Larvae of the order Lepidoptera include, but are not limited to, armyworms, cutworms, loopers and heliothines in the family Noctuidae Spodoptera frupperda JE Smith (fall armyworm); S. exigua Hübner (beet armyworm); S. litura Fabricius (tobacco cutworm, cluster caterpillar); Mamestra configurata Walker (bertha armyworm); M. brassicae Linnaeus (cabbage moth); Agrotis Ipsilon Hufnagel (black cutworm); A. orthogonia Morrison (western cutworm); A. subterranea Fabricius (granulate cutworm); Alabama argillacea Hübner (cotton leaf worm); Trichoplusia ni Hübner (cabbage looper); Pseudoplusia includens Walker (soybean looper); Anticarsia gemmatalis Hübner (velvetbean caterpillar); Hypena scabra Fabricius (green cloverworm); Heliothis virescens Fabricius (tobacco budworm); Pseudaletia unipuncta Haworth (armyworm); Athetis mindara Barnes and Mcdunnough (rough skinned cutworm); Euxoa messoria Harris (darksided cutworm); Earias insulana Boisduval (spiny bollworm); E. vittella Fabricius (spotted bollworm); Helicoverpa armigera Hübner (American bollworm); H zea Boddie (corn earworm or cotton bollworm); Melanchra picta Harris (zebra caterpillar); Egira (Xylomyges) curialis Grote (citrus cutworm); borers, casebearers, webworms, coneworms, and skeletonizers from the family Pyralidae Ostrinia nubilalis Hübner (European corn borer); Amyelois transitella Walker (naval orangeworm); Anagasta kuehniella Zeller (Mediterranean flour moth); Cadra cautella Walker (almond moth); Chilo suppressalis Walker (rice stem borer); C. partellus, (sorghum borer); Corcyra cephalonica Stainton (rice moth); Crambus caliginosellus Clemens (corn root webworm); C. teterrellus Zincken (bluegrass webworm); Cnaphalocrocis medinalis Guenée (rice leaf roller); Desmia funeralis Hübner (grape leaffolder); Diaphania hyalinata Linnaeus (melon worm); D. nitidalis Stoll (pickleworm); Diatraea grandiosella Dyar (southwestern corn borer), D. saccharalis Fabricius (surgarcane borer); Eoreuma loftini Dyar (Mexican rice borer); Ephestia elutella Hübner (tobacco (cacao) moth); Galleria mellonella Linnaeus (greater wax moth); Herpetogramma licarsisalis Walker (sod webworm); Homoeosoma electellum Hulst (sunflower moth); Elasmopalpus lignosellus Zeller (lesser cornstalk borer); Achroia grisella Fabricius (lesser wax moth); Loxostege sticticalis Linnaeus (beet webworm); Orthaga thyrisalis Walker (tea tree web moth); Maruca testulalis Geyer (bean pod borer); Plodia interpunctella Hübner (Indian meal moth); Scirpophaga incertulas Walker (yellow stem borer); Udea rubigalis Guenée (celery leather); and leafrollers, budworms, seed worms and fruit worms in the family Tortricidae Acleris gloverana Walsingham (Western blackheaded budworm); A. variana Fernald (Eastern blackheaded budworm); Archips argyrospila Walker (fruit tree leaf roller); A. rosana Linnaeus (European leaf roller); and other Archips species, Adoxophyes orana Fischer von Rösslerstamm (summer fruit tortrix moth); Cochylis hospes Walsingham (banded sunflower moth); Cydia latiferreana Walsingham (filbertworm); C. pomonella Linnaeus (coding moth); Platynota flavedana Clemens (variegated leafroller); P. stultana Walsingham (omnivorous leafroller); Lobesia botrana Denis & Schiffermüller (European grape vine moth); Spilonota ocellana Denis & Schiffermüller (eyespotted bud moth); Endopiza viteana Clemens (grape berry moth); Eupoecilia ambiguella Hübner (vine moth); Bonagota salubricola Meyrick (Brazilian apple leafroller); Grapholita molesta Busck (oriental fruit moth); Suleima helianthana Riley (sunflower bud moth); Argyrotaenia spp.; Choristoneura spp.

[0240] Selected other agronomic pests in the order Lepidoptera include, but are not limited to, Alsophila pometaria Harris (fall cankerworm); Anarsia lineatella Zeller (peach twig borer); Anisota senatoria J. E. Smith (orange striped oakworm); Antheraea pernyi Guérin-Méneville (Chinese Oak Tussah Moth); Bombyx mori Linnaeus (Silkworm); Bucculatrix thurberiella Busck (cotton leaf perforator); Colias eurytheme Boisduval (alfalfa caterpillar); Datana integerrima Grote & Robinson (walnut caterpillar); Dendrolimus sibiricus Tschetwerikov (Siberian silk moth), Ennomos subsignaria Hübner (elm spanworm); Erannis tiliaria Harris (linden looper); Euproctis chrysorrhoea Linnaeus (browntail moth); Harrisina americana Guérin-Méneville (grapeleaf skeletonizer); Hemileuca oliviae Cockrell (range caterpillar); Hyphantria cunea Drury (fall webworm); Keiferia lycopersicella Walsingham (tomato pinworm); Lambdina fiscellaria fiscellaria Hulst (Eastern hemlock looper); L. fiscellaria lugubrosa Hulst (Western hemlock looper); Leucoma salicis Linnaeus (satin moth); Lymantria dispar Linnaeus (gypsy moth); Manduca quinquemaculata Haworth (five spotted hawk moth, tomato hornworm); M. sexta Haworth (tomato hornworm, tobacco hornworm); Operophtera brumata Linnaeus (winter moth); Paleacrita vernata Peck (spring cankerworm); Papilio cresphontes Cramer (giant swallowtail orange dog); Phryganidia californica Packard (California oakworm); Phyllocnistis citrella Stainton (citrus leafminer); Phyllonorycter blancardella Fabricius (spotted tentiform leafminer); Pieris brassicae Linnaeus (large white butterfly); P. rapae Linnaeus (small white butterfly); P. napi Linnaeus (green veined white butterfly); Platyptilia carduidactyla Riley (artichoke plume moth); Plutella xylostella Linnaeus (diamondback moth); Pectinophora gossypiella Saunders (pink bollworm); Pontia protodice Boisduval and Leconte (Southern cabbageworm); Sabulodes aegrotata Guenée (omnivorous looper); Schizura concinna J. E. Smith (red humped caterpillar); Sitotroga cerealella Olivier (Angoumois grain moth); Thaumetopoea pityocampa Schiffermuller (pine processionary caterpillar); Tineola bisselliella Hummel (webbing clothesmoth); Tuta absoluta Meyrick (tomato leafminer); Yponomeuta padella Linnaeus (ermine moth); Heliothis subflexa Guenée; Malacosoma spp. and Orgyia spp.

[0241] Of interest are larvae and adults of the order Coleoptera including weevils from the families Anthribidae, Bruchidae and Curculionidae (including, but not limited to: Anthonomus grand's Boheman (boll weevil); Lissorhoptrus oryzophilus Kuschel (rice water weevil); Sitophilus granarius Linnaeus (granary weevil); S. oryzae Linnaeus (rice weevil); Hypera punctata Fabricius (clover leaf weevil); Cylindrocopturus adspersus LeConte (sunflower stem weevil); Smicronyx fulvus LeConte (red sunflower seed weevil); S. sordidus LeConte (gray sunflower seed weevil); Sphenophorus maidis Chittenden (maize billbug)); flea beetles, cucumber beetles, rootworms, leaf beetles, potato beetles and leafminers in the family Chrysomelidae (including, but not limited to: Leptinotarsa decemlineata Say (Colorado potato beetle); Diabrotica virgifera virgifera LeConte (western corn rootworm); D. barberi Smith and Lawrence (northern corn rootworm); D. undecimpunctata howardi Barber (southern corn rootworm); Chaetocnema pulicaria Melsheimer (corn flea beetle); Phyllotreta cruciferae Goeze (Crucifer flea beetle); Phyllotreta striolata (stripped flea beetle); Colaspis brunnea Fabricius (grape colaspis); Oulema melanopus Linnaeus (cereal leaf beetle); Zygogramma exclamationis Fabricius (sunflower beetle)); beetles from the family Coccinellidae (including, but not limited to: Epilachna varivestis Mulsant (Mexican bean beetle)); chafers and other beetles from the family Scarabaeidae (including, but not limited to: Popillia japonica Newman (Japanese beetle); Cyclocephala borealis Arrow (northern masked chafer, white grub); C. immaculata Olivier (southern masked chafer, white grub); Rhizotrogus majalis Razoumowsky (European chafer); Phyllophaga crinita Burmeister (white grub); Ligyrus gibbosus De Geer (carrot beetle)); carpet beetles from the family Dermestidae; wireworms from the family Elateridae, Eleodes spp., Melanotus spp.; Conoderus spp.; Limonius spp.; Agriotes spp.; Ctenicera spp.; Aeolus spp.; bark beetles from the family Scolytidae and beetles from the family Tenebrionidae.

[0242] Adults and immatures of the order Diptera are of interest, including leafminers Agromyza parvicornis Loew (corn blotch leafininer); midges (including, but not limited to: Contarinia sorghicola Coquillett (sorghum midge); Mayetiola destructor Say (Hessian fly); Sitodiplosis mosellana Géhin (wheat midge); Neolasioptera murtfeldtiana Felt, (sunflower seed midge)); fruit flies (Tephritidae), Oscinella frit Linnaeus (fruit flies); maggots (including, but not limited to: Delia platura Meigen (seedcorn maggot); D. coarctata Fallen (wheat bulb fly) and other Delia spp., Meromyza americana Fitch (wheat stem maggot); Musca domestica Linnaeus (house flies); Fannia canicularis Linnaeus, F. femoralis Stein (lesser house flies); Stomoxys calcitrans Linnaeus (stable flies)); face flies, horn flies, blow flies, Chrysomya spp.; Phormia spp. and other muscoid fly pests, horse flies Tabanus spp.; bot flies Gastrophilus spp.; Oestrus spp.; cattle grubs Hypoderma spp.; deer flies Chrysops spp.; Melophagus ovinus Linnaeus (keds) and other Brachycera, mosquitoes Aedes spp.; Anopheles spp.; Culex spp.; black flies Prosimulium spp.; Simulium spp.; biting midges, sand flies, sciarids, and other Nematocera.

[0243] Included as insects of interest are adults and nymphs of the orders Hemiptera and Homoptera such as, but not limited to, adelgids from the family Adelgidae, plant bugs from the family Miridae, cicadas from the family Cicadidae, leafhoppers, Empoasca spp.; from the family Cicadellidae, planthoppers from the families Cixiidae, Flatidae, Fulgoroidea, Issidae and Delphacidae, treehoppers from the family Membracidae, psyllids from the family Psyllidae, whiteflies from the family Aleyrodidae, aphids from the family Aphididae, phylloxera from the family Phylloxeridae, mealybugs from the family Pseudococcidae, scales from the families Asterolecanidae, Coccidae, Dactylopiidae, Diaspididae, Eriococcidae Ortheziidae, Phoenicococcidae and Margarodidae, lace bugs from the family Tingidae, stink bugs from the family Pentatomidae, cinch bugs, Blissus spp.; and other seed bugs from the family Lygaeidae, spittlebugs from the family Cercopidae squash bugs from the family Coreidae and red bugs and cotton stainers from the family Pyrrhocoridae.

[0244] Agronomically important members from the order Homoptera further include, but are not limited to: Acyrthisiphon pisum Harris (pea aphid); Aphis craccivora Koch (cowpea aphid); A. fabae Scopoli (black bean aphid); A. gossypii Glover (cotton aphid, melon aphid); A. maidiradicis Forbes (corn root aphid); A. pomi De Geer (apple aphid); A. spiraecola Patch (spirea aphid); Aulacorthum solani Kaltenbach (foxglove aphid); Chaetosiphon fragaefolii Cockerell (strawberry aphid); Diuraphis noxia Kurdjumov/Mordvilko (Russian wheat aphid); Dysaphis plantaginea Paaserini (rosy apple aphid); Eriosoma lanigerum Hausmann (woolly apple aphid); Brevicoryne brassicae Linnaeus (cabbage aphid); Hyalopterus pruni Geoffroy (mealy plum aphid); Lipaphis erysimi Kaltenbach (turnip aphid); Metopolophium dirrhodum Walker (cereal aphid); Macrosiphum euphorbiae Thomas (potato aphid); Myzus persicae Sulzer (peach-potato aphid, green peach aphid); Nasonovia ribisnigri Mosley (lettuce aphid); Pemphigus spp. (root aphids and gall aphids); Rhopalosiphum maidis Fitch (corn leaf aphid); R. padi Linnaeus (bird cherry-oat aphid); Schizaphis graminum Rondani (greenbug); Sipha flava Forbes (yellow sugarcane aphid); Sitobion avenae Fabricius (English grain aphid); Therioaphis maculata Buckton (spotted alfalfa aphid); Toxoptera aurantii Boyer de Fonscolombe (black citrus aphid) and T. citricida Kirkaldy (brown citrus aphid); Adelges spp. (adelgids); Phylloxera devastatrix Pergande (pecan phylloxera); Bemisia tabaci Gennadius (tobacco whitefly, sweetpotato whitefly); B. argentifolii Bellows & Perring (silverleaf whitefly); Dialeurodes citri Ashmead (citrus whitefly); Trialeurodes abutiloneus (bandedwinged whitefly) and T. vaporariorum Westwood (greenhouse whitefly); Empoasca fabae Harris (potato leafhopper); Laodelphax striatellus Fallen (smaller brown planthopper); Macrolestes quadrihneatus Forbes (aster leafhopper); Nephotettix cinticeps Uhler (green leafhopper); N. nigropictus Stål (rice leafhopper); Nilaparvata lugens Stål (brown planthopper); Peregrinus maidis Ashmead (corn planthopper); Sogatella furcifera Horvath (white-backed planthopper); Sogatodes orizicola Muir (rice delphacid); Typhlocyba pomaria McAtee (white apple leafhopper); Erythroneoura spp. (grape leafhoppers); Magicicada septendecim Linnaeus (periodical cicada); Icerya purchasi Maskell (cottony cushion scale); Quadraspidiotus perniciosus Comstock (San Jose scale); Planococcus citri Risso (citrus mealybug); Pseudococcus spp. (other mealybug complex); Cacopsylla pyricola Foerster (pear psylla); Trioza diospyri Ashmead (persimmon psylla).

[0245] Agronomically important species of interest from the order Hemiptera include, but are not limited to: Acrosternum hilare Say (green stink bug); Anasa tristis De Geer (squash bug); Blissus leucopterus leucopterus Say (chinch bug); Corythuca gossypii Fabricius (cotton lace bug); Cyrtopeltis modesta Distant (tomato bug); Dysdercus suturellus Herrich-Schaffer (cotton stainer); Euschistus serous Say (brown stink bug); E. variolarius Palisot de Beauvois (one-spotted stink bug); Graptostethus spp. (complex of seed bugs); Leptoglossus corculus Say (leaf-footed pine seed bug); Lygus lineolaris Palisot de Beauvois (tarnished plant bug); L. Hesperus Knight (Western tarnished plant bug); L. pratensis Linnaeus (common meadow bug); L. ruguhpennis Poppius (European tarnished plant bug); Lygocoris pabulinus Linnaeus (common green capsid); Nezara viridula Linnaeus (southern green stink bug); Oebalus pugnax Fabricius (rice stink bug); Oncopeltus fasciatus Dallas (large milkweed bug); Pseudatomoscelis seriatus Reuter (cotton fleahopper).

[0246] Furthermore, embodiments may be effective against Hemiptera such, Calocoris norvegicus Gmelin (strawberry bug); Orthops campestris Linnaeus; Plesiocoris rugicollis Fallen (apple capsid); Cyrtopeltis modestus Distant (tomato bug); Cyrtopeltis notatus Distant (suckfly); Spanagonicus albofasciatus Reuter (whitemarked fleahopper); Diaphnocoris chlorionis Say (honeylocust plant bug); Labopidicola allii Knight (onion plant bug); Pseudatomoscelis seriatus Reuter (cotton fleahopper); Adelphocoris rapidus Say (rapid plant bug); Poecilocapsus lineatus Fabricius (four-lined plant bug); Nysius ericae Schilling (false chinch bug); Nysius raphanus Howard (false chinch bug); Nezara viridula Linnaeus (Southern green stink bug); Eurygaster spp.; Coreidae spp.; Pyrrhocoridae spp.; Tinidae spp.; Blostomatidae spp.; Reduviidae spp. and Cimicidae spp.

[0247] Also included are adults and larvae of the order Acari (mites) such as Aceria tosichella Keifer (wheat curl mite); Petrobia latens Müller (brown wheat mite); spider mites and red mites in the family Tetranychidae, Panonychus ulmi Koch (European red mite); Tetranychus urticae Koch (two spotted spider mite); (T. mcdanieli McGregor (McDaniel mite); T. cinnabarinus Boisduval (carmine spider mite); T. turkestani Ugarov & Nikolski (strawberry spider mite); flat mites in the family Tenuipalpidae, Brewpalpus lewisi McGregor (citrus flat mite); rust and bud mites in the family Eriophyidae and other foliar feeding mites and mites important in human and animal health, i.e., dust mites in the family Epidermoptidae, follicle mites in the family Demodicidae, grain mites in the family Glycyphagidae, ticks in the order Ixodidae. Ixodes scapularis Say (deer tick); I. holocyclus Neumann (Australian paralysis tick); Dermacentor variabilis Say (American dog tick); Amblyomma americanum Linnaeus (lone star tick) and scab and itch mites in the families Psoroptidae, Pyemotidae and Sarcoptidae.

[0248] Insect pests of the order Thysanura are of interest, such as Lepisma saccharina Linnaeus (silverfish); Thermobia domestica Packard (firebrat).

[0249] Additional arthropod pests covered include: spiders in the order Araneae such as Loxosceles reclusa Gertsch and Mulaik (brown recluse spider) and the Latrodectus mactans Fabricius (black widow spider) and centipedes in the order Scutigeromorpha such as Scutigera coleoptrata Linnaeus (house centipede).

[0250] Insect pest of interest include the superfamily of stink bugs and other related insects including but not limited to species belonging to the family Pentatomidae (Nezara viridula, Halyomorpha halys, Piezodorus guildini, Euschistus serous, Acrosternum hilare, Euschistus heros, Euschistus tristigmus, Acrosternum hilare, Dichelops furcatus, Dichelops melacanthus, and Bagrada hilaris (Bagrada Bug)), the family Plataspidae (Megacopta cribraria—Bean plataspid) and the family Cydnidae (Scaptocoris castanea—Root stink bug) and Lepidoptera species including but not limited to: diamond-back moth, e.g., Helicoverpa zea Boddie; soybean looper, e.g., Pseudoplusia includens Walker and velvet bean caterpillar e.g., Anticarsia gemmatalis Hübner.

[0251] Methods for measuring pesticidal activity are well known in the art. See, for example, Czapla and Lang, (1990) J. Econ. Entomol. 83:2480-2485; Andrews, et al., (1988) Biochem. J. 252:199-206; Marrone, et al., (1985) J. of Economic Entomology 78:290-293 and U.S. Pat. No. 5,743,477, all of which are herein incorporated by reference in their entirety. Generally, the protein is mixed and used in feeding assays. See, for example Marrone, et al., (1985) J. of Economic Entomology 78:290-293. Such assays can include contacting plants with one or more pests and determining the plant's ability to survive and/or cause the death of the pests.

[0252] Nematodes include parasitic nematodes such as root-knot, cyst and lesion nematodes, including Heterodera spp., Meloidogyne spp. and Globodera spp.; particularly members of the cyst nematodes, including, but not limited to, Heterodera glycines (soybean cyst nematode); Heterodera schachtii (beet cyst nematode); Heterodera avenae (cereal cyst nematode) and Globodera rostochiensis and Globodera pailida (potato cyst nematodes). Lesion nematodes include Pratylenchus spp.

[0253] Seed Treatment

[0254] To protect and to enhance yield production and trait technologies, seed treatment options can provide additional crop plan flexibility and cost effective control against insects, weeds and diseases. Seed material can be treated, typically surface treated, with a composition comprising combinations of chemical or biological herbicides, herbicide safeners, insecticides, fungicides, germination inhibitors and enhancers, nutrients, plant growth regulators and activators, bactericides, nematocides, avicides and/or molluscicides. These compounds are typically formulated together with further carriers, surfactants or application-promoting adjuvants customarily employed in the art of formulation. The coatings may be applied by impregnating propagation material with a liquid formulation or by coating with a combined wet or dry formulation. Examples of the various types of compounds that may be used as seed treatments are provided in The Pesticide Manual: A World Compendium, C. D. S. Tomlin Ed., Published by the British Crop Production Council, which is hereby incorporated by reference.

[0255] Some seed treatments that may be used on crop seed include, but are not limited to, one or more of abscisic acid, acibenzolar-S-methyl, avermectin, amitrol, azaconazole, azospirillum, azadirachtin, azoxystrobin, Bacillus spp. (including one or more of cereus, firmus, megaterium, pumilis, sphaericus, subtilis and/or thuringiensis species), Bradyrhizobium spp. (including one or more of betae, canariense, elkanii, iriomotense, japonicum, liaonigense, pachyrhizi and/or yuanmingense), captan, carboxin, chitosan, clothianidin, copper, cyazypyr, difenoconazole, etidiazole, fipronil, fludioxonil, fluoxastrobin, fluquinconazole, flurazole, fluxofenim, harpin protein, imazalil, imidacloprid, ipconazole, isoflavenoids, lipo-chitooligosaccharide, mancozeb, manganese, maneb, mefenoxam, metalaxyl, metconazole, myclobutanil, PCNB, penflufen, penicillium, penthiopyrad, permethrine, picoxystrobin, prothioconazole, pyraclostrobin, rynaxypyr, S-metolachlor, saponin, sedaxane, TCMTB, tebuconazole, thiabendazole, thiamethoxam, thiocarb, thiram, tolclofos-methyl, triadimenol, trichoderma, trifloxystrobin, triticonazole and/or zinc. PCNB seed coat refers to EPA Registration Number 00293500419, containing quintozen and terrazole. TCMTB refers to 2-(thiocyanomethylthio) benzothiazole.

[0256] Seed varieties and seeds with specific transgenic traits may be tested to determine which seed treatment options and application rates may complement such varieties and transgenic traits in order to enhance yield. For example, a variety with good yield potential but head smut susceptibility may benefit from the use of a seed treatment that provides protection against head smut, a variety with good yield potential but cyst nematode susceptibility may benefit from the use of a seed treatment that provides protection against cyst nematode, and so on. Likewise, a variety encompassing a transgenic trait conferring insect resistance may benefit from the second mode of action conferred by the seed treatment, a variety encompassing a transgenic trait conferring herbicide resistance may benefit from a seed treatment with a safener that enhances the plants resistance to that herbicide, etc. Further, the good root establishment and early emergence that results from the proper use of a seed treatment may result in more efficient nitrogen use, a better ability to withstand drought and an overall increase in yield potential of a variety or varieties containing a certain trait when combined with a seed treatment.

[0257] Methods for Killing an Insect Pest and Controlling an Insect Population

[0258] In some embodiments methods are provided for killing an insect pest, comprising contacting the insect pest with an insecticidally-effective amount of a silencing element and at least one recombinant plant derived perforin including but not limited to a IPD079 polypeptide and a silencing element disclosed herein. In some embodiments methods are provided for killing an insect pest, comprising contacting the insect pest with an insecticidally-effective amount of a recombinant pesticidal protein of SEQ ID NO: 2, SEQ ID NO: 4, SEQ ID NO: 6, SEQ ID NO: 8, SEQ ID NO: 10, SEQ ID NO: 12, SEQ ID NO: 14, SEQ ID NO: 16, SEQ ID NO: 18, SEQ ID NO: 20, SEQ ID NO: 22, SEQ ID NO: 24, SEQ ID NO: 26, SEQ ID NO: 28, SEQ ID NO: 30, SEQ ID NO: 32, SEQ ID NO: 34, SEQ ID NO: 36, SEQ ID NO: 38, SEQ ID NO: 40, SEQ ID NO: 42, SEQ ID NO: 44, SEQ ID NO: 46, SEQ ID NO: 48, SEQ ID NO: 50, SEQ ID NO: 52, SEQ ID NO: 54, SEQ ID NO: 72, SEQ ID NO: 74, SEQ ID NO: 76, SEQ ID NO: 78, SEQ ID NO: 80, SEQ ID NO: 82, SEQ ID NO: 84, SEQ ID NO: 86, SEQ ID NO: 88, SEQ ID NO: 90, SEQ ID NO: 92, SEQ ID NO: 94, SEQ ID NO: 56, SEQ ID NO: 58, SEQ ID NO: 60, SEQ ID NO: 62, SEQ ID NO: 64, SEQ ID NO: 66, SEQ ID NO: 68, SEQ ID NO: 70, SEQ ID NO: 96, SEQ ID NO: 98, SEQ ID NO: 100, SEQ ID NO: 102, SEQ ID NO: 104, SEQ ID NO: 106, SEQ ID NO: 108, SEQ ID NO: 110, SEQ ID NO: 112, SEQ ID NO: 114, SEQ ID NO: 116, SEQ ID NO: 118, SEQ ID NO: 120, SEQ ID NO: 122, SEQ ID NO: 124, SEQ ID NO: 126, SEQ ID NO: 128, SEQ ID NO: 130, SEQ ID NO: 132, SEQ ID NO: 134, SEQ ID NO: 136, SEQ ID NO: 138, or SEQ ID NO: 140 or a variant thereof and a silencing element disclosed herein.

[0259] In some embodiments methods are provided for controlling an insect pest population, comprising contacting the insect pest population with an insecticidally-effective amount of one or more recombinant IPD079 polypeptide(s) and one or more polynucleotides encoding a silencing element(s). As used herein, “controlling a pest population” or “controls a pest” refers to any effect on a pest that results in limiting the damage that the pest causes. Controlling a pest includes, but is not limited to, killing the pest, inhibiting development of the pest, altering fertility or growth of the pest in such a manner that the pest provides less damage to the plant, decreasing the number of offspring produced, producing less fit pests, producing pests more susceptible to predator attack or deterring the pests from eating the plant.

[0260] In some embodiments methods are provided for controlling an insect pest population resistant to a pesticidal protein, comprising contacting the insect pest population with an insecticidally-effective amount of one or more recombinant IPD079 polypeptide and one or more silencing elements disclosed herein.

[0261] In some embodiments methods are provided for protecting a plant from an insect pest, comprising expressing in the plant or cell thereof a recombinant polynucleotide encoding one or more IPD079 polypeptide(s) and one or more silencing element(s) disclosed herein.

[0262] Insect Resistance Management (IRM) Strategies

[0263] Expression of B. thuringiensis δ-endotoxins in transgenic corn plants has proven to be an effective means of controlling agriculturally important insect pests (Perlak, et al., 1990; 1993). However, insects have evolved that are resistant to B. thuringiensis δ-endotoxins expressed in transgenic plants. Such resistance, should it become widespread, would clearly limit the commercial value of germplasm containing genes encoding such B. thuringiensis 6-endotoxins.

[0264] One way to increasing the effectiveness of the transgenic insecticides against target pests and contemporaneously reducing the development of insecticide-resistant pests is to use provide non-transgenic (i.e., non-insecticidal protein) refuges (a section of non-insecticidal crops/corn) for use with transgenic crops producing a single insecticidal protein active against target pests. The United States Environmental Protection Agency (epa.gov/oppbppdl/biopesticides/pips/bt_corn_refuge_2006.htm, which can be accessed using the www prefix) publishes the requirements for use with transgenic crops producing a single Bt protein active against target pests. In addition, the National Corn Growers Association, on their website: (ncga.com/insect-resistance-management-fact-sheet-bt-corn, which can be accessed using the www prefix) also provides similar guidance regarding refuge requirements. Due to losses to insects within the refuge area, larger refuges may reduce overall yield.

[0265] Another way of increasing the effectiveness of the transgenic insecticides against target pests and contemporaneously reducing the development of insecticide-resistant pests would be to have a repository of insecticidal genes that are effective against groups of insect pests and which manifest their effects through different modes of action.

[0266] Expression in a plant of two or more insecticidal compositions toxic to the same insect species, each insecticide being expressed at efficacious levels would be another way to achieve control of the development of resistance. This is based on the principle that evolution of resistance against two separate modes of action is far more unlikely than only one. Roush, for example, outlines two-toxin strategies, also called “pyramiding” or “stacking,” for management of insecticidal transgenic crops. (The Royal Society. Phil. Trans. R. Soc. Lond. B. (1998) 353:1777-1786). Stacking or pyramiding of two different proteins each effective against the target pests and with little or no cross-resistance can allow for use of a smaller refuge. The US Environmental Protection Agency requires significantly less (generally 5%) structured refuge of non-Bt corn be planted than for single trait products (generally 20%). There are various ways of providing the IRM effects of a refuge, including various geometric planting patterns in the fields and in-bag seed mixtures, as discussed further by Roush.

[0267] In some embodiments a silencing element disclosed herein and a plant derived perforin of the disclosure, including but not limited to an IPD079 polypeptide, are useful as an insect resistance management strategy together or in combination (i.e., pyramided) with other pesticidal proteins include but are not limited to Bt toxins, Xenorhabdus sp. or Photorhabdus sp. insecticidal proteins, and the like.

[0268] Provided are methods of controlling Lepidoptera and/or Coleoptera insect infestation(s) in a transgenic plant that promote insect resistance management, comprising expressing in the plant at least two different insecticidal proteins having different modes of action.

[0269] In some embodiments the methods of controlling Lepidoptera and/or Coleoptera insect infestation in a transgenic plant and promoting insect resistance management the at least one of the insecticidal proteins comprise a silencing element and an IPD079 polypeptide insecticidal to insects in the order Lepidoptera and/or Coleoptera.

[0270] In some embodiments the methods of controlling Lepidoptera and/or Coleoptera insect infestation in a transgenic plant and promoting insect resistance management comprise expression in the transgenic plant of at least one of the insecticidal proteins comprises an IPD079 polypeptide of SEQ ID NO: 2, SEQ ID NO: 4, SEQ ID NO: 6, SEQ ID NO: 8, SEQ ID NO: 10, SEQ ID NO: 12, SEQ ID NO: 14, SEQ ID NO: 16, SEQ ID NO: 18, SEQ ID NO: 20, SEQ ID NO: 22, SEQ ID NO: 24, SEQ ID NO: 26, SEQ ID NO: 28, SEQ ID NO: 30, SEQ ID NO: 32, SEQ ID NO: 34, SEQ ID NO: 36, SEQ ID NO: 38, SEQ ID NO: 40, SEQ ID NO: 42, SEQ ID NO: 44, SEQ ID NO: 46, SEQ ID NO: 48, SEQ ID NO: 50, SEQ ID NO: 52, SEQ ID NO: 54, SEQ ID NO: 72, SEQ ID NO: 74, SEQ ID NO: 76, SEQ ID NO: 78, SEQ ID NO: 80, SEQ ID NO: 82, SEQ ID NO: 84, SEQ ID NO: 86, SEQ ID NO: 88, SEQ ID NO: 90, SEQ ID NO: 92, SEQ ID NO: 94, SEQ ID NO: 56, SEQ ID NO: 58, SEQ ID NO: 60, SEQ ID NO: 62, SEQ ID NO: 64, SEQ ID NO: 66, SEQ ID NO: 68, SEQ ID NO: 70, SEQ ID NO: 96, SEQ ID NO: 98, SEQ ID NO: 100, SEQ ID NO: 102, SEQ ID NO: 104, SEQ ID NO: 106, SEQ ID NO: 108, SEQ ID NO: 110, SEQ ID NO: 112, SEQ ID NO: 114, SEQ ID NO: 116, SEQ ID NO: 118, SEQ ID NO: 120, SEQ ID NO: 122, SEQ ID NO: 124, SEQ ID NO: 126, SEQ ID NO: 128, SEQ ID NO: 130, SEQ ID NO: 132, SEQ ID NO: 134, SEQ ID NO: 136, SEQ ID NO: 138, or SEQ ID NO: 140 or variants thereof, insecticidal to insects in the order Lepidoptera and/or Coleoptera.

[0271] Also provided are methods of reducing likelihood of emergence of Lepidoptera and/or Coleoptera insect resistance to transgenic plants expressing in the plants insecticidal proteins to control the insect species, comprising expression of an IPD079 polypeptide and one or more silencing elements insecticidal to the insect species in combination with a second insecticidal protein to the insect species having different modes of action.

[0272] Also provided are means for effective Lepidoptera and/or Coleoptera insect resistance management of transgenic plants, comprising co-expressing at high levels in the plants two or more insecticidal proteins toxic to Lepidoptera and/or Coleoptera insects but each exhibiting a different mode of effectuating its killing activity, wherein the two or more insecticidal proteins comprise an IPD079 polypeptide disclosed herein and a Cry protein.

[0273] In some embodiments, a stack of one or more IPD079 polypeptides disclosed herein and one or more silencing elements disclosed herein increases the durability of insecticidal effectiveness in a plant of any plant perforin, any IPD079 polypeptide, or the IPD079 polypeptide disclosed herein compared to a plant lacking the silencing element disclosed herein.

[0274] The description of various illustrated embodiments of the disclosure is not intended to be exhaustive or to limit the scope to the precise form disclosed. While specific embodiments of and examples are described herein for illustrative purposes, various equivalent modifications are possible within the scope of the disclosure, as those skilled in the relevant art will recognize. The teachings provided herein can be applied to other purposes, other than the examples described above. Numerous modifications and variations are possible in light of the above teachings and, therefore, are within the scope of the appended claims.

[0275] These and other changes may be made in light of the above detailed description. In general, in the following claims, the terms used should not be construed to limit the scope to the specific embodiments disclosed in the specification and the claims.

[0276] The entire disclosure of each document cited (including patents, patent applications, journal articles, abstracts, manuals, books or other disclosures) in the Background, Detailed Description, and Examples is herein incorporated by reference in their entireties.

[0277] Efforts have been made to ensure accuracy with respect to the numbers used (e.g. amounts, temperature, concentrations, etc.) but some experimental errors and deviations should be allowed for. Unless otherwise indicated, parts are parts by weight, molecular weight is average molecular weight; temperature is in degrees centigrade; and pressure is at or near atmospheric.

### EXPERIMENTALS

### Example 1—Insecticidal Activity of Transgenic Plants Expressing IPD079 and dsRNA COATG Silencing Element

[0278] Rootworms assays were performed by infesting plants which had been recently transplanted from flats into pots with a volume of approximately 3 liters. Two days after transplanting, plants were infested with 200 western corn rootworm eggs suspended in water. Eggs were timed so hatch would occur within a few days of infestation. Plants were maintained with standard greenhouse practices of watering and applications of fertilizer. 19 days later, plants were removed from pots and the soil washed from the roots to expose the feeding damage. Ratings were made using the Node Injury Scale developed by Nowatzki et al (2005) J. of Economic Entomology, 98, 1-8. The Nodal Injury Score is based on number of root nodes of damage with 0 indicating no damage and 3 indicating 3 nodes of roots are eaten to a length of less than 2 centimeters. The stacked constructs show significantly reduced feeding damage compared to the negative controls (FIG. 1).

### Example 2—Expression of dsRNA COATG Silencing Element in IPD079 and dsRNA COATG Silencing Element Stacked Transgenic Maize

[0279] QuantiGene® Plex 2.0 RNA assay (Affymetrix®) was used for detecting a dsRNA targeting a fragment of Diabrotica virgifera virgifera coatomer, gamma subunit (COATG; SEQ ID NO: 1322) sense strand of transcript in transgenic plants. Double strand RNA targeting COATG was made by In vitro transcription. Purified dsRNA was quantified by OD260 and used as standard for quantitative detection. Transgenic roots (about 45 mg) were collected from each individual TO plant and processed for QuantiGene® detection according to the QuantiGene® 2.0 User Manual. RNA expression data were calculated as picogram per mg fresh root (or pg/mg). The stacked constructs showed significant expression of dsRNA targeting COATG, with no detection in a negative control.

### Example 3—Expression of IPD079 Polypeptide in IPD079 and dsRNA COATG Silencing Element Stacked Transgenic Maize

[0280] The absolute expression concentration of IPD079 protein (SEQ ID NO: 56) was determined by using LC-MS/MS (liquid chromatography coupled with tandem mass spectrometry) according J Agric Food Chem. 2011 Apr. 27; 59(8):3551-8). After being lyophilized and ground, 10 mg of leaf samples were extracted with 600 μl PBST buffer (phosphate-buffered saline and 0.05% Tween 20). Approximately 500 mg of fresh frozen root samples were extracted with 1000 PBST buffer. After centrifugation, the supernatant was collected and total extracted proteins (TEPs) were measured with a Bradford assay. Samples were normalized by TEP. A total of 50 μL of the normalized extract was added to 100 μL of digestion buffer ABCT (100 mM ammonium bicarbonate and 0.05% Tween 20). A standard curve was prepared by spiking different amounts of the recombinant protein standard into 50 μL aliquots of negative sample extract. An appropriate amount of the digestion buffer ABCT was added to each point of the standard curve to keep total volumes consistent among samples and standards. Samples and standards were reduced with 6 μL of 0.25 M dithiothreitol at 50° C. for 30 min and then alkylated with 6 μL of 0.3 M iodoacetamide at room temperature in the dark for 30 min. One μg of trypsin (10 μL) was added to each sample and digestion was allowed to proceed at 37° C. overnight (˜18 hours) before 10 μL 10% (v/v) formic acid was added. IPD079 protein was quantified by monitoring its signature tryptic peptide QETWDR with MRM (multiple reaction monitoring) transition of 417.7/577.3, using a Waters UPLC (ultra-performance liquid chromatography) coupled with AB SCIEX Q-TRAP 5500. Autosampler temperature was maintained at 8° C. during analysis. 10 μL volumes were injected onto an BEH 50×2.1 mm 1.7μ C18 column (Waters) maintained at 60° C. Mobile phases consisted of 0.1% formic acid (MPA) and 0.1% formic acid in acetonitrile (MPB), and LC was performed at a flow rate of 1.0 mL/min with linear gradient of 2-10% MPB in 1.5 min. Protein concentrations in the unknown samples were calculated by interpolation into the standard curve using Analyst version 1.6.2 software (AB Sciex). The stacked constructs showed significant expression of IPD079, with no detection in a negative control.

### Example 4—Agrobacterium-Mediated Stable Transformation of Maize

[0281] For Agrobacterium-mediated maize transformation of IPD079 and dsRNA COATG silencing element stacked transgenic maize, the method of Zhao was employed (U.S. Pat. No. 5,981,840 and International Patent Publication Number WO 1998/32326, the contents of which are hereby incorporated by reference). Briefly, immature embryos were isolated from maize and the embryos contacted with an Agrobacterium Suspension, where the bacteria were capable of transferring a polynucleotide encoding a IPD079 polypeptide and a polynucleotide encoding a silencing element targeting COATG to at least one cell of at least one of the immature embryos (step 1: the infection step). In this step the immature embryos were immersed in an Agrobacterium suspension for the initiation of inoculation. The embryos were co-cultured for a time with the Agrobacterium (step 2: the co-cultivation step). The immature embryos were cultured on solid medium with antibiotic, but without a selecting agent, for Agrobacterium elimination and for a resting phase for the infected cells. Next, inoculated embryos were cultured on medium containing a selective agent and growing transformed callus is recovered (step 4: the selection step). The immature embryos were cultured on solid medium with a selective agent resulting in the selective growth of transformed cells. The callus was then regenerated into plants (step 5: the regeneration step), and calli grown on selective medium were cultured on solid medium to regenerate the plants. Transgenic maize plants positive for expression of the insecticidal proteins are tested for pesticidal activity using standard bioassays known in the art. Such methods include, for example, root excision bioassays and whole plant bioassays. See, e.g., US Patent Application Publication Number US 2003/0120054 and International Publication Number WO 2003/018810.

The application's sequence listing, which the Patent Office published only in electronic form, follows.

SEQUENCE LISTING (1377 sequences)

SEQ ID NO: 1 - DNA, 1353 bp, Lycopodium phlehmaria
atggcccaaatagagccattacctggatcggatgcaatcggactcagttatgatgtattcggattttacgccaaccccaagagcgttaatagacagctcttcgactttgcccctcagcaagaaattactttagaggaccacacatggctcctctccactgatattgtatatattgctgtacgcgatacggatataaacaccgtctctcttcgcacaaaagatgcatactccacggagctggctgcaagcgtaaaagtatccggcagctatggcagcttctcggcttcggtagagtctgatttctcccaaagcatcagcgatgagacggattccacttacacttcagttcgtacaaatgtgaacaagtggaagctcagtctgaagccaactgtggaagaactgcgttccatgttgacaccttcgttcaaggaagctttggcgagtatgaactcggaggagctgtttacgacgtacggaacacattatctgaatgaggtgttggtgggaggtcgcgcagattatgtcgccaccaccaaaaccagtgcattcagctctgatactaaaatcagcgtagttgcggagagttcattcaagtcagtggctggcatggaggtatccgccgagtacaaggagcttatcaagaaattccaagagaacagctccactagtctgtacgccctcggtgggaccgcactctccagcatcacagacacggccagttacaacgcatggttcagttcgattgatacacttcccgtcttctgtggattcacttacgaaagtcttcagcccatctgggaactcgctgaatcccctcagcgccaggagatcctccagaaggctacgaagacctttattccgcccgaaatcagacgaaatgcaatcgtcgacgtagatattatcgtgtccgacaactattgggtgaatcctccctacggctatacgaagatcgattatgatctgaaccgcaatgccaagggcaaatatatctttttgtgctacaatcaacagaagatatcagtagcaggatcccctgcggatccgacgcccatcactgccttgtacgtggcttctggcgatgacgatcatccatacgttcctctaggttataccaggatcaacagcgatctgaacgagggtgcggggggcaaatatatctatctatgctacacaaaagatccggctgcaatacccagcgacgaggatggactgcccatacgtggcatccgcgttattggtaatgaaaaagtcgagaatgtggttacaccttacggattcacgaagattgataaagatctgaacgagggtgcaggaggagactatatcttcgtttgtttctcacgtcatttagac

SEQ ID NO: 2 - protein, 451 aa, Lycopodium phlehmaria
MAQIEPLPGSDAIGLSYDVFGFYANPKSVNRQLFDFAPQQEITLEDHTWLLSTDIVYIAVRDTDINTVSLRTKDAYSTELAASVKVSGSYGSFSASVESDFSQSISDETDSTYTSVRTNVNKWKLSLKPTVEELRSMLTPSFKEALASMNSEELFTTYGTHYLNEVLVGGRADYVATTKTSAFSSDTKISVVAESSFKSVAGMEVSAEYKELIKKFQENSSTSLYALGGTALSSITDTASYNAWFSSIDTLPVFCGFTYESLQPIWELAESPQRQEILQKATKTFIPPEIRRNAIVDVDIIVSDNYWVNPPYGYTKIDYDLNRNAKGKYIFLCYNQQKISVAGSPADPTPITALYVASGDDDHPYVPLGYTRINSDLNEGAGGKYIYLCYTKDPAAIPSDEDGLPIRGIRVIGNEKVENVVTPYGFTKIDKDLNEGAGGDYIFVCFSRHLD

SEQ ID NO: 3 - DNA, 1353 bp, Huperzia salvinioides
atggcccaaatagagccattacctggatcggatgcaatcggacacagttatgacgtattcggattttacgccaaccccaagagcgttaatagccagctcttcgactttgcccctcagcaagaaattattttagaggaccacaaatggctcctctccactgatattgtatatgttgctgtccgggatacggatataaaaaccgtctctctttgcacaaaagatgaatactccacggagctggctgcaagcgtaaaattgtccggcagctatggcagcttctcggcttcggtagagtctgatttctcccaaagcatcagcgatgacacggattccacttacacttcagttcgtacaaatgtgaacaagtggaagctcagtctgaagccaactgtggaagaactgcgttccatgttgacaccttcgttcaaggaagctttggcgagtatgaactcggaggagctgtttacgacgtacggaacacattatctgagtgaggtgttggtgggaggtcgcgcagattatgtcgccaccaccaaaaccagtgcattcagctctgatattcaaatcagcgtagttgcggagagttcattcaagtccgtggctggcatggacgtatcatccaagtacaaggaacttatccagatattccaagagaacagcttcactagtctgtacgccatcggtgggaccgcactctccagcatcacagacacggacacttacaatgcatggctcagttcgattgatacacttcccgtcttctgtggattcacttgcgaaagtcttcagcccatctgggaactcgctgaatcccctcagcgccaggagatcctccagaaggctacgatgacctttattccgcccgaaatcagacgaaatgcgatcgtcgacgtagatattatcgtgtccgacaactattcggtgaatcctccctacggctatacgaagatcgattatgatctgaaccgcaatgccgagggcaaatatatctttttgtgctacaatcaacagaagatatcagtagcaggatcccctgcggatccgaagcccatcaccgccttggacgtggcttctggcgatgacgatgatccagacgttcctcctggttataccaggatcaacagcgatctgaacgagggtgcggggggcaaatatatctatctatgctacacaaaagatccggctgcaatacccagcgacgaggatggactgcccatacgtggcatccgcgttattggtaacgaaaaactcgagaatgtggttacaccttacggattcacgaagattgataaagatctgaacgagggtgcagggggagactatgtcttcgtttgtttctcacgtcatttagac

SEQ ID NO: 4 - protein, 451 aa, Huperzia salvinioides
MAQIEPLPGSDAIGHSYDVFGFYANPKSVNSQLFDFAPQQEIILEDHKWLLSTDIVYVAVRDTDIKTVSLCTKDEYSTELAASVKLSGSYGSFSASVESDFSQSISDDTDSTYTSVRTNVNKWKLSLKPTVEELRSMLTPSFKEALASMNSEELFTTYGTHYLSEVLVGGRADYVATTKTSAFSSDIQISVVAESSFKSVAGMDVSSKYKELIQIFQENSFTSLYAIGGTALSSITDTDTYNAWLSSIDTLPVFCGFTCESLQPIWELAESPQRQEILQKATMTFIPPEIRRNAIVDVDIIVSDNYSVNPPYGYTKIDYDLNRNAEGKYIFLCYNQQKISVAGSPADPKPITALDVASGDDDDPDVPPGYTRINSDLNEGAGGKYIYLCYTKDPAAIPSDEDGLPIRGIRVIGNEKLENVVTPYGFTKIDKDLNEGAGGDYVFVCFSRHLD

SEQ ID NO: 5 - DNA, 1353 bp, Huperzia salvinioides
atggcccaaatagagccattacctggatcggatgcaatcggacacagttatgacgtattcggattttacgccaaccccaagagcgttaatagccagctcttcgactttgcccctcagcaagaaattattttagaggaccacaaatggctcctctccactgatattgtatatgttgctgtccgggatacggatataaaaaccgtctctctttgcacaaaagatgaatactccacggagctggctgcaagcgtaaaattgtccggcagctatggcagcttctcggcttcggtagagtctgatttctcccaaagcatcagcgatgacacggattccacttacacttcagttcgtacaaatgtgaacaagtggaagctcagtctgaagccaactgtggaagaactgcgttccatgttgacaccttcgttcaaggaagctttggcgagtatgaactcggaggagctgtttacgacgtacggaacacattatctgagtgaggtgttggtgggaggtcgcgcagattatgtcgccaccaccaaaaccagtgcattcagctctgatattcaaatcagcgtagttgcggagagttcattcaagtccgtggctggcatggacgtatcatccaagtacaaggaacttatccagatattccaagagaacagcttcactagtctgtacgccatcggtgggaccgcactctccagcatcacagacacggacacttacaatgcatggctcagttcgattgatacacttcccgtcttctgtggattcacttgcgaaagtcttcagcccatctgggaactcgctgaatcccctcagcgccaggagatcctccagaaggctacgatgacctttattccgcccgaaatcagacgaaatgcgatcgtcgacgtagatattatcgtgtccgacaactattcggtgaatcctccctacggctatacgaagatcgattatgatctgaaccgcaatgccgagggcaaatatatctttttgtgctacaatcaacagaagatatcagtagcaggatcccctgcggatccgaagcccatcaccgccttggacgtggcttctggcgatgacaatgatccagacgttcctcctggttataccaggatcaacagcgatctgaacgagggtgcggggggcaaatatatctatctatgctacacaaaagatccggctgcaatacccagcgacgaggatggactgcccatacgtggcatccgcgttattggtaacgaaaaactcgagaatgtggttacaccttacggattcacgaagattgataaagatctgaacgagggtgcagagggagactatgtcttcgtttgtttctcacgtcatttagac

SEQ ID NO: 6 - protein, 451 aa, Huperzia salvinioides
MAQIEPLPGSDAIGHSYDVFGFYANPKSVNSQLFDFAPQQEIILEDHKWLLSTDIVYVAVRDTDIKTVSLCTKDEYSTELAASVKLSGSYGSFSASVESDFSQSISDDTDSTYTSVRTNVNKWKLSLKPTVEELRSMLTPSFKEALASMNSEELFTTYGTHYLSEVLVGGRADYVATTKTSAFSSDIQISVVAESSFKSVAGMDVSSKYKELIQIFQENSFTSLYAIGGTALSSITDTDTYNAWLSSIDTLPVFCGFTCESLQPIWELAESPQRQEILQKATMTFIPPEIRRNAIVDVDIIVSDNYSVNPPYGYTKIDYDLNRNAEGKYIFLCYNQQKISVAGSPADPKPITALDVASGDDNDPDVPPGYTRINSDLNEGAGGKYIYLCYTKDPAAIPSDEDGLPIRGIRVIGNEKLENVVTPYGFTKIDKDLNEGAEGDYVFVCFSRHLD

SEQ ID NO: 7 - DNA, 1353 bp, Lycopodium nummulariifolium
atggcccgtatcgagccattacctggatcggatgcaatcggacacagttatgatgtattcggattttacgccaaccccaagagcgttaatacacagctcttcgactttgcccctcagcaagaaattattttagaggaccacaaatggctcctctccactgatattgaatatattgctgtccgagatacggaaataaaaaccgtctctcttcgtacaaaagatgcatactccacggagctggctgcaagcgtaaaagtatccggcagctatggcagcttctcggcttcggtagagtctgatttctcccaaagcatcagcgatgagactgattccacttacacttctgttcgtacaaatgtgaacaagtggaagctcagtctgaagccaactgtggaagaactgcgttccatgttgacaccttcgttcaaggaagctttggcgagtatggactcggaggagctgtttacgacgtacgggacacattatctgagtgaggtgttggtgggaggtcgcgcagattatgtcgccaccaccaaaaccagtgcattcagctctgatattcaaatcagcgtagttgcggagtgttcattcaagtccgtggctggcatggacgtatcagccaagtacaaggagcttatccagaaattccaagagaacagctccactagtctgtacgccatcggtgggaccacaatctccagcatcacagacaaagacacttacaatgcatggctcagttcgattgatacacgtcccgtcttctgtggattcacttacgaaagtcttcagcccatttgggaacttgctgaatcccctcagcgccaggagatcctgcaaaaggctacgaagacctttatttcgcccgaaatcaaacgaaatgcaatcgtcgacgtagatattatcgtgtccgacaactatggggtgaatcctccctacggctatacgaagatcgattatgatctgaaccacaatgccaagggcaaatttatctttttgtgctacaatcaacagaagatatcagtagcaggatcccctgcggatccgaagcccatcactgctttgtacgtggcttctggcgatgacgatcatccatacgttcctccaggctataccaggatcagcagcgatctgaacgagggtgcggggggcaaatttatctatctatgctacacaaaagatccggctgcaatacccagcgacgaggatggactgcccatacgtggcatccgcgttattggtaacgaaaatatcgacaatgtggttacaccttacggattcacgaagattgataaagatctgaacgagggtgcagggggagactttatcttcgttcgtttctcacctcatttagac

SEQ ID NO: 8 - protein, 451 aa, Lycopodium nummulariifolium
MARIEPLPGSDAIGHSYDVFGFYANPKSVNTQLFDFAPQQEIILEDHKWLLSTDIEYIAVRDTEIKTVSLRTKDAYSTELAASVKVSGSYGSFSASVESDFSQSISDETDSTYTSVRTNVNKWKLSLKPTVEELRSMLTPSFKEALASMDSEELFTTYGTHYLSEVLVGGRADYVATTKTSAFSSDIQISVVAECSFKSVAGMDVSAKYKELIQKFQENSSTSLYAIGGTTISSITDKDTYNAWLSSIDTRPVFCGFTYESLQPIWELAESPQRQEILQKATKTFISPEIKRNAIVDVDIIVSDNYGVNPPYGYTKIDYDLNHNAKGKFIFLCYNQQKISVAGSPADPKPITALYVASGDDDHPYVPPGYTRISSDLNEGAGGKFIYLCYTKDPAAIPSDEDGLPIRGIRVIGNENIDNVVTPYGFTKIDKDLNEGAGGDFIFVRFSPHLD

SEQ ID NO: 9 - DNA, 1353 bp, Lycopodium nummulariifolium
atggcccgtatcgagccattacctggatcggatgcaatcggacacagttatgatgtattcggattttacgccaaccccaggagcgttaatacacagctcttcgactttgcccctcagcaagaaattattttagaggaccacaaatggctcctctccactgatattgaatatattgctgtccgagaaaccgaaataaaaaccgtctctcttcgtacaaaagatgcatactccacggagctggctgcaagcgtaaaagtgtccggcagctatggcagcttctcggcttcggtagagtctgatttctcccaaagcatcagcgatgagacggattccacttatacttctgttcgtacaaatgtgaacaagtggaagctcagtctgaagccaactgtggaagaactgcgttccatgttgacaccttcgttcaaggaagctttggcgagtatggacttggaggagctgtttacgacgtacgggacacattatctgagtgaggtgttggtgggaggtcgcgcagattatgtcgccaccaccaaaaccagtgcattcagctctgagattcaaatcagcgtagttgcggagtgttcattcaagtccgtggctggcatggacgtatcagccaagtacaaggagcttatccagaaattccaagagaacagctccactagtctgtacgccatcggtgggaccacaatctccagcatcacagacaaagacacttacaatgcatggctcagttcgattgatacacgtcccgtcttctgtggattcacttacgaaagtcttcagcccatttgggaactcgctgaatcccctcagcgccaggagatcctgcaaaaggctacgaagacctttattccgcccgaaatcaaacgaaatgcaatcgtcgacgtagatattatcgtgtccgacaactatggggtgaatcctccctacagctatacgaagatcgattatgatctgaaccacaatgccaagggcaaatttatctttttgtgctacaatcaacagaagatatcagtagcaggatcccctgcggatccgaagcccatcactgccttgtacgtggcttctggcgatgacgatcatccatacgttcctccaggctataccaggatcagcagcgatctgaacgagggtgcggggggcaaatttatctatctatgctacacaaaagatccggctgcaatacccagcgacgaggatggactgcccatacgtggcatccgcgttattggtaacgaaaatatcgacaatgtggttacaccttacggattcacgaagattgataaagatctgaacgagggtgcagggggagactttatctacgttcgtttctcacctcatttagac

SEQ ID NO: 10 - protein, 451 aa, Lycopodium nummulariifolium
MARIEPLPGSDAIGHSYDVFGFYANPRSVNTQLFDFAPQQEIILEDHKWLLSTDIEYIAVRETEIKTVSLRTKDAYSTELAASVKVSGSYGSFSASVESDFSQSISDETDSTYTSVRTNVNKWKLSLKPTVEELRSMLTPSFKEALASMDLEELFTTYGTHYLSEVLVGGRADYVATTKTSAFSSEIQISVVAECSFKSVAGMDVSAKYKELIQKFQENSSTSLYAIGGTTISSITDKDTYNAWLSSIDTRPVFCGFTYESLQPIWELAESPQRQEILQKATKTFIPPEIKRNAIVDVDIIVSDNYGVNPPYSYTKIDYDLNHNAKGKFIFLCYNQQKISVAGSPADPKPITALYVASGDDDHPYVPPGYTRISSDLNEGAGGKFIYLCYTKDPAAIPSDEDGLPIRGIRVIGNENIDNVVTPYGFTKIDKDLNEGAGGDFIYVRFSPHLD

SEQ ID NO: 11 - DNA, 1353 bp, Lycopodium nummulariifolium
atggcccgtatcgagccattacctggatcggatgcaatcggacacagttatgatgtattcggattttacgccaaccccaagagcgttaatacacagctcttcgactttgcccctcagcaagaaattattttagaggaccacaaatggctcctctccactgatattgaatatattgctgtccgagatacggaaataaaaaccgtctctcttcgtacaaaagatgcatactccacggagctggctgcaagcgtaaaagtgtccggcagctatggcagcttctcggcttcggtagagtctgatttctcccaaagcatcagcgatgagactgattccacttacacttctgttcgtacaaatgtgaacaagtggaagctcagtctgaagccaactgtggaagaactgcgttccatgttgacaccttcgttcaaggaagctttggcgagtatggactcggaggagctgtttacgacgtacgggacacattatctgagtgaggtgttggtgggaggtcgcgcagattatgtcgccaccaccaaaaccagtgcattcagctctgatattcaaatcagcgtaggtgcggagtgttcattcaagtccgtggttggcatggacgtatcagccaagtacaaggagcttatccagaaattccaagagaacagctccactagtctgtacgccatcggtgggaccgaaatctccagcatcacagacacggacacttacaatgcatggctcagttcgattgatacacgtcccgtcttctgtggattcacttacgaaagtcttcagcccatttgggaactcgctgaatcccctcagcgccaggagatcctccaaaaggctacgaagacctttatttcgcccgaaatcaaacgcaatgcaatcgtcgacgtagatattatcgtgtccgacaactatggggtgaatcctccctacggctatacgaagatcgattatgatctgaaccgcaatgccaagggcaaatttatctttttgtgctacaatcaacagaagatatcagtagcaggatcccctgcggatccgaagcccatcactgctttgtacgtggcttctggcgatgacgatcatccatacgttcctccaggctataccaggatcagcagcgatctgaacgagggtgcggggggcaaatttatctatctatgctacacaaaagatccggctgcaatacccagcgacgaggatggactgcccatacgtggcatccgcgttattggtaacgaaaatatcgagaatgtggttacaccttacggattcacgaagattgataaagatctgaacgagggtgcagggggagactttatcttcgttcgtttctcacctcatttagac

SEQ ID NO: 12 - protein, 451 aa, Lycopodium nummulariifolium
MARIEPLPGSDAIGHSYDVFGFYANPKSVNTQLFDFAPQQEIILEDHKWLLSTDIEYIAVRDTEIKTVSLRTKDAYSTELAASVKVSGSYGSFSASVESDFSQSISDETDSTYTSVRTNVNKWKLSLKPTVEELRSMLTPSFKEALASMDSEELFTTYGTHYLSEVLVGGRADYVATTKTSAFSSDIQISVGAECSFKSVVGMDVSAKYKELIQKFQENSSTSLYAIGGTEISSITDTDTYNAWLSSIDTRPVFCGFTYESLQPIWELAESPQRQEILQKATKTFISPEIKRNAIVDVDIIVSDNYGVNPPYGYTKIDYDLNRNAKGKFIFLCYNQQKISVAGSPADPKPITALYVASGDDDHPYVPPGYTRISSDLNEGAGGKFIYLCYTKDPAAIPSDEDGLPIRGIRVIGNENIENVVTPYGFTKIDKDLNEGAGGDFIFVRFSPHLD

SEQ ID NO: 13 - DNA, 1353 bp, Lycopodium nummulariifolium
atggcccgtatcgagccattacctggatcggatgcaatcggacacagttatgatgtattcggattttacgccaaccccaagagcgttaatacacagctcttcgactttgcccctcagcaagaaattattttagaggaccacaaatggctcctctccactgatattgaatatattgctgtccgagatacggaaataaaaaccgtctctcttcgtacaaaagatgcatactccacggagctggctgcaagcgtaaaagtatccggcagctatggcagcttctcggcttcggtagagtctgatttctcccaaagcatcagcgatgagactgattccacttacacttctgttcgtacaaatgtgaacaagtggaagctcagtctgaagccaactgtggaagaactgcgttccatgttgacaccttcgttcaaggaagctttggcgagtatggactcggaggagctgtttacgacgtacgggacacattatctgagtgaggtgttggtgggaggtcgcgcagattatgtcgccaccaccaaaaccagtgcattcagctctgatattcaaatcagcgtagttgcggagtgttcattcaagtccgtggctggcatggacgtatcagccaagtacaaggagcttatccagaaattccaagagaacagctccactagtctgtacgccatcggtgggaccacaatctccagcatcacagacaaagacacttacaatgcatggctcagttcgattgatacacgtcccgtcttctgtggattcacttacgaaagtcttcagcccatttgggaacttgctgaatcccctcagcgccaggagatcctgcaaaaggctacgaagacctttatttcgcccgaaatcaaacgaaatgcaatcgtcgacgtagatattatcgtgtccgacaactatggggtgaatcctccctacggctatacgaagatcgattatgatctgaaccacaatgccaagggcaaatttatctttttgtgctacaatcaacagaagatatcagtagcaggatcccctgcggatccgaagcccatcactgttttgtacgtggcttctggcgatgacgatcatccatacgttcctccaggctataccaggatcagcagcgatctgaacgagggtgcggggggcaaatttatctatctatgctacacaaaagatccggctgcaatacccagcgacgaggatggactgcccatacgtggcatccgcgttattggtaacgaaaatatcgacaatgtggttacaccttacggattcacgaagattgataaagatctgaacgagggtgcagggggagactttatcttcgttcgtttctcacctcatttagac

SEQ ID NO: 14 - protein, 451 aa, Lycopodium nummulariifolium
MARIEPLPGSDAIGHSYDVFGFYANPKSVNTQLFDFAPQQEIILEDHKWLLSTDIEYIAVRDTEIKTVSLRTKDAYSTELAASVKVSGSYGSFSASVESDFSQSISDETDSTYTSVRTNVNKWKLSLKPTVEELRSMLTPSFKEALASMDSEELFTTYGTHYLSEVLVGGRADYVATTKTSAFSSDIQISVVAECSFKSVAGMDVSAKYKELIQKFQENSSTSLYAIGGTTISSITDKDTYNAWLSSIDTRPVFCGFTYESLQPIWELAESPQRQEILQKATKTFISPEIKRNAIVDVDIIVSDNYGVNPPYGYTKIDYDLNHNAKGKFIFLCYNQQKISVAGSPADPKPITVLYVASGDDDHPYVPPGYTRISSDLNEGAGGKFIYLCYTKDPAAIPSDEDGLPIRGIRVIGNENIDNVVTPYGFTKIDKDLNEGAGGDFIFVRFSPHLD

SEQ ID NO: 15 - DNA, 1353 bp, Lycopodium nummulariifolium
atggcccgtatcgagccattacctggatcggatgcaatcggacacagttatgatgtattcggattttacgccaaccccaggagcgttaatacacagctcttcgactttgcccctcagcaagaaattattttagaggaccacaaatggctcctctccactgatattgaatatattgctgtccgagaaaccgaaataaaaaccgtctctcttcgtacaaaagatgcatactccacggagctggctgcaagcgtaaaagtgtccggcagctatggcagcttctcggcttcggtagagtctgatttctcccaaagcatcagcgatgagacggattccacttacacttctgttcgtacaaatgtgaacaagtggaagctcagtctgaagccaactgtggaagaactgcgttccatgttgacaccttcgttcaaggaagctttggcgagtatggactcggaggagctgtttacgacgtacgggacacattatctgagtgaggtgttggtgggaggtcgcgcagattatgtcgccaccaccaaaaccagtgcattcagctctgatattcaaatcagcgtagttgcggagtgttcattcaagtccgtggctggcatggacgtatcagccaagtacaaggagcttatccagaaattccaagagaacagctccactagtctgtacgccatcggtgggaccacaatctccagcatcacagacaaagacacttacaatgcatggctcagttcgattgatacacgtcccgtcttctgtggattcacttacgaaagtcttcagcccatctgggaactcgctgaatcccctcagcgccaggagatcctccaaaaggctacgaagacctttattccgcccgaagtcagacgaaatgcgatcgtggacgtagagattaccgtgtccgacagctattgggtgaatcctccctacggctatacgaagatcgattatgatctgaaccgcaatgccaagggcaaatatatctttttgtgctacaatcaacagaagatatcagtagcaggatcccctgcggatccgaagcccatcactgccttgtacgtggcttctggcgatgacaataatccatacattcctccaggttataccaggatcaacagcgatctgaacgagggtgcggggggcaaatttatttatctatgctacacaaaagatccggctgcaatacccagcgacgaggatggactgcccatacgtggcatccgcgttattggtaacgaaaatggccagaatgtggttacaccttacggattcacgaagattgataaagatctgaacgagggtgcagggggagactatatcttcgttcgtttctcacctcatttagac

SEQ ID NO: 16 - protein, 451 aa, Lycopodium nummulariifolium
MARIEPLPGSDAIGHSYDVFGFYANPRSVNTQLFDFAPQQEIILEDHKWLLSTDIEYIAVRETEIKTVSLRTKDAYSTELAASVKVSGSYGSFSASVESDFSQSISDETDSTYTSVRTNVNKWKLSLKPTVEELRSMLTPSFKEALASMDSEELFTTYGTHYLSEVLVGGRADYVATTKTSAFSSDIQISVVAECSFKSVAGMDVSAKYKELIQKFQENSSTSLYAIGGTTISSITDKDTYNAWLSSIDTRPVFCGFTYESLQPIWELAESPQRQEILQKATKTFIPPEVRRNAIVDVEITVSDSYWVNPPYGYTKIDYDLNRNAKGKYIFLCYNQQKISVAGSPADPKPITALYVASGDDNNPYIPPGYTRINSDLNEGAGGKFIYLCYTKDPAAIPSDEDGLPIRGIRVIGNENGQNVVTPYGFTKIDKDLNEGAGGDYIFVRFSPHLD

SEQ ID NO: 17 - DNA, 1353 bp, Lycopodium nummulariifolium
atggcccgtatcgagccattacctggatcggatgcaatcggacacagttatgatgtattcggattttacgccaaccccaagagcgttaatagacagctcttcgactttgcccctcagcaagaaattattttagaggaccacaaatggctcctctccactgatattgaatatattgctgttcgagatacggaaataaaaaccgtctctcttcgtacaaaagatgcatactccacggagctggctgcaagcgtaaaagtgtccggcagctatggcagcttctcggcttcggtagagtctgatttctcccaaagcatcagcgatgagacggattccacttacacttctgttcgtacaaatgtgaacaagtggaagctcagtctgaagccaactgtggaagaactgcgttccatgttgacaccttcgttcaagcaagctttggcgagtatgaactcggaggagctgtttacgacgtacgggacacattatctgagtgaggttttggtgggaggtcgcgcagattatgtcgccaccaccaaaaccagtgcattcagctctgatattcaaatcagcgtaggtgcggagtgttcattcaagtccgtggctggcatggacgtatcagccaagtacaaggagcttatccagaaattccaagagaacagctccactagtctgtacgccatcggtgggaccgcaatctccagcatcacagacacggacacttacaatgcatggctcagttcgattgatacacgtcccgtcttctgtggattcacttacgaaagtcttcagcccatttgggaactcgctgaatcccctcaacgccaggagatcctccaaaaggctacgaagacctttatttcgcccgaaatcaaacgcaatgcaatcgtcgacgtagatattatcgtgtccgacaactatggggtgaatcctccctacggctatacgaagatcgattatgatctgaaccgcaatgccaagggcaaatttatctttttgtgctacaatcaacagaagatatcagtagcaggatcccctgcggatccgaagcccatcactgctttgtacgtggcttctggcgatgacgatcatccatacgttcctccaggctataccaggatcagcagcgatctgaacgagggtgcggggggcaaatttatctatctatgctacacaaaagatccggctgcaatacccagcgacgaggatggactgcccatacgtggcatccgcgttattggtaacgaaaatatcgacaatgtggttacaccttacggattcacgaagattgataaagatctgaacgagggtgcagggggagactttatctacgttcgtttctcacctcatttagac

SEQ ID NO: 18 - protein, 451 aa, Lycopodium nummulariifolium
MARIEPLPGSDAIGHSYDVFGFYANPKSVNRQLFDFAPQQEIILEDHKWLLSTDIEYIAVRDTEIKTVSLRTKDAYSTELAASVKVSGSYGSFSASVESDFSQSISDETDSTYTSVRTNVNKWKLSLKPTVEELRSMLTPSFKQALASMNSEELFTTYGTHYLSEVLVGGRADYVATTKTSAFSSDIQISVGAECSFKSVAGMDVSAKYKELIQKFQENSSTSLYAIGGTAISSITDTDTYNAWLSSIDTRPVFCGFTYESLQPIWELAESPQRQEILQKATKTFISPEIKRNAIVDVDIIVSDNYGVNPPYGYTKIDYDLNRNAKGKFIFLCYNQQKISVAGSPADPKPITALYVASGDDDHPYVPPGYTRISSDLNEGAGGKFIYLCYTKDPAAIPSDEDGLPIRGIRVIGNENIDNVVTPYGFTKIDKDLNEGAGGDFIYVRFSPHLD

SEQ ID NO: 19 - DNA, 1353 bp, Lycopodium nummulariifolium
atggcccgtatcgagccattacctggatcggatgcaatcggacacagttatgatgtattcggattttacgccaaccccaagagcgttaatagacagctcttcgactttgcccctcagcaagaaattattttagaggaccacaaatggctcctctccactgatattgaatatattgctgttcgagatacggaaataaaaaccgtctctcttcgtacaaaagatgcatactccacggagctggctgcaagcgtaaaagtgtccggcagctatggcagcttctcggcttcggtagagtctgatttctcccaaagcatcagcgatgagacggattccacttacacttctgttcgtacaaatgtgaacaagtggaagctcagtctgaagccaactgtggaagaactgcgttccatgttgacaccttcgttcaagcaagctttggcgagtatgaactcggaggagctgtttacgacgtacgggacacattatctgagtgaggttttggtgggaggtcgcgcagattatgtcgccaccaccaaaaccagtgcattcagctctgatattcaaatcagcgtaggtgcggagtgttcattcaagtccgtggctggcatggacgtatcagccaagtacaaggagcttatccagaaattccaagagaacagctccactagtctgtacgccatcggtgggaccgcaatctccagcatcacagacacggacacttacaatgcatggctcagttcgattgatacacgtcccgtcttctgtggattcacttacgaaagtcttcagcccatttgggaactcgctgaatcccctcaacgccaggagatcctccaaaaggctacgaagacctttatttcgcccgaaatcaaacgaaatgcaatcgtcgacgtagatattatcgtgtccgacaactatggggtgaatcctccctacggctatacgaagatcgattatgatctgaaccgcaatgccaagggcaaatttatctttttgtgctacaatcaacagaagatatcagtagcaggatcccctgcggatccgaagcccatcactgttttgtacgtggcttctggcgatgacgatcatccatacgttcctccaggttacaccaggatcagcagcgatctgaacgagggtgcggggggcaaatttatctatctatgctacacaaaagatccggctgcaatacccatcgacgaggatggactgcccatacgtggcatccgcgttattggtaacgaaaatatcgagaatgtggttacaccttacggattcacaacgattgataaagatctgaacgagggtgcagggggagactttatcttcgttcgtttctcacctcatttagac

SEQ ID NO: 20 - protein, 451 aa, Lycopodium nummulariifolium
MARIEPLPGSDAIGHSYDVFGFYANPKSVNRQLFDFAPQQEIILEDHKWLLSTDIEYIAVRDTEIKTVSLRTKDAYSTELAASVKVSGSYGSFSASVESDFSQSISDETDSTYTSVRTNVNKWKLSLKPTVEELRSMLTPSFKQALASMNSEELFTTYGTHYLSEVLVGGRADYVATTKTSAFSSDIQISVGAECSFKSVAGMDVSAKYKELIQKFQENSSTSLYAIGGTAISSITDTDTYNAWLSSIDTRPVFCGFTYESLQPIWELAESPQRQEILQKATKTFISPEIKRNAIVDVDIIVSDNYGVNPPYGYTKIDYDLNRNAKGKFIFLCYNQQKISVAGSPADPKPITVLYVASGDDDHPYVPPGYTRISSDLNEGAGGKFIYLCYTKDPAAIPIDEDGLPIRGIRVIGNENIENVVTPYGFTTIDKDLNEGAGGDFIFVRFSPHLD

SEQ ID NO: 21 - DNA, 1353 bp, Lycopodium nummulariifolium
atggcccgtatcgagccattacctggatcggatgcaatcggacacagttatgatgtattcggattttacgccaaccccaagagcgttaatagacagctcttcgactttgcccctcagcaagaaattgttttagaggaccacaaatggctcctctccactgatattgaatatattgctgttcgagatacggaaataaaaaccgtctctcttcgtacaaaagatgcatactccacggagctggctgcaagcgtaaaagtgtccggcagctatggcagcttctcggcttcggtagagtctgatttctcccaaagcatcagcgatgagacggattccacttacacttctgttcgtacaaatgtgaacaagtggaagctcagtctgaagccaactgtggaagaactgcgttccatgttgacaccttcgttcaagcaagctttggcgagtatgaactcggaggagctgtttacgacgtacgggacacattatctgagtgaggttttggtgggaggtcgcgcagattatgtcgccaccaccaaaaccagtgcattcagctctgatattcaaatcagcgtaggtgcggagtgttcattcaagtccgtggctggcatggacgtatcagccaagtacaaggagcttatccagaaattccaagagaacagctccactagtctgtacgccatcggtgggaccgcaatctccagcatcacagacacggacacttacaatgcatggctcagttcgattgatacacgtcccgtcttctgtggattcacttacgaaagtcttcagcccatttgggaactcgctgaatcccctcaacgccaggagatcctccaaaaggctacgaagacctttatttcgcccgaaatcaaacgaaatgcaatcgtcgacgtagatattatcgtgtccgacaactatggggtgaatcctccctacggctatacgaagatcgattatgatctgaaccgcaatgccaagggcaaatttatctttttgtgctacaatcaacagaagatatcagtagcaggatcccctgcggatccgaagcccatcactgctttgtacgtggcttctggcgatgacgatcatccatacgttcctccaggctataccaggatcagcagcgatctgaacgagggtgcggggggcaaatttatctatctatgctacacaaaagatccggctgcaatacccagcgacgaggatggactgcccatacgtggcatccgcgttattggtaacgaaaatatcgacaatgtggttacaccttacggattcacgaagattgataaagatctgaacgagggtgcagggggagactttatctacgttcgtttctcacctcatttagac

SEQ ID NO: 22 - protein, 451 aa, Lycopodium nummulariifolium
MARIEPLPGSDAIGHSYDVFGFYANPKSVNRQLFDFAPQQEIVLEDHKWLLSTDIEYIAVRDTEIKTVSLRTKDAYSTELAASVKVSGSYGSFSASVESDFSQSISDETDSTYTSVRTNVNKWKLSLKPTVEELRSMLTPSFKQALASMNSEELFTTYGTHYLSEVLVGGRADYVATTKTSAFSSDIQISVGAECSFKSVAGMDVSAKYKELIQKFQENSSTSLYAIGGTAISSITDTDTYNAWLSSIDTRPVFCGFTYESLQPIWELAESPQRQEILQKATKTFISPEIKRNAIVDVDIIVSDNYGVNPPYGYTKIDYDLNRNAKGKFIFLCYNQQKISVAGSPADPKPITALYVASGDDDHPYVPPGYTRISSDLNEGAGGKFIYLCYTKDPAAIPSDEDGLPIRGIRVIGNENIDNVVTPYGFTKIDKDLNEGAGGDFIYVRFSPHLD

SEQ ID NO: 23 - DNA, 1353 bp, Lycopodium nummulariifolium
atggcccgtatcgagccattacctggatcggatgcaatcggacacagttatgatgtattcggattttacgccaaccccaggagcgttaatacacagctcttcgactttgcccctcagcaagaaattattttagaggaccacaaatggctcctctccactgatattgaatatattgctgtccgagaaaccgaaataaaaaccgtctctcttcgtacaaaagatgcatactccacggagctggctgcaagcgtaaaagtgtccggcagctatggcagcttctcggcttcggtagagtctgatttctcccaaagcatcagcgatgagacggattccacttacacttctgttcgtacaaatgtgaacaagtggaagctcagtctgaagccaactgtggaagaactgcgttccatgttgacaccttcgttcaaggaagctttggcgagtatggactcggaggagctgtttacgacgtacgggacacattatctgagtgaggtgttggtgggaggtcgcgcagattatgtcgccaccaccaaaaccagtgcattcagctctgatattcaaatcagcgtagttgcggagtgttcattcaagtccgtggctggcatggacgtatcagccaagtacaaggagcttatccagaaattccaagagaacagctctactagtctgtacgccatcggtgggaccacaatctccagcatcacagacaaagacacttacaatgcatggctcagttcgattgatacacgtcccgtcttctgtggattcacttacgaaagtcttcagcccatttgggaactcgctgaatcccctcagcgccaggagatcctccaaaaggctacgaagacctttatttcgcccgaaatcaaacgaaatgcaatcgtcgacgtagatattatcgtgtccgacaactatggggtgaatcctccctacggctatacgaagatcgattatgatctgaaccgcggtgccaagggcaaatttatctatttatgctacaagcaacagaagatatcagtagcaggatcccctgcggatccgaaacccatcactgccttgaacgtggtttctagcgattaccatgatccatccggtccttcaggttataccatgatctacacagatctgaaccagggtgtggggggcaagtttatctatctctgctacacaaaagatccagctgcaatacccagcgacgaagatggactgcccatacgtggcatccgcgttattggtaacccacagttcgggaatgtggttacaccttacggattcacgaggattgataaagatctgaatgagggtgcaaagggagagtttatctacgttcgtttctcacctcatttagac

SEQ ID NO: 24 - protein, 451 aa, Lycopodium nummulariifolium
MARIEPLPGSDAIGHSYDVFGFYANPRSVNTQLFDFAPQQEIILEDHKWLLSTDIEYIAVRETEIKTVSLRTKDAYSTELAASVKVSGSYGSFSASVESDFSQSISDETDSTYTSVRTNVNKWKLSLKPTVEELRSMLTPSFKEALASMDSEELFTTYGTHYLSEVLVGGRADYVATTKTSAFSSDIQISVVAECSFKSVAGMDVSAKYKELIQKFQENSSTSLYAIGGTTISSITDKDTYNAWLSSIDTRPVFCGFTYESLQPIWELAESPQRQEILQKATKTFISPEIKRNAIVDVDIIVSDNYGVNPPYGYTKIDYDLNRGAKGKFIYLCYKQQKISVAGSPADPKPITALNVVSSDYHDPSGPSGYTMIYTDLNQGVGGKFIYLCYTKDPAAIPSDEDGLPIRGIRVIGNPQFGNVVTPYGFTRIDKDLNEGAKGEFIYVRFSPHLD

SEQ ID NO: 25 - DNA, 1353 bp, Lycopodium nummulariifolium
atggcccgtatcgagccattacctggatcggatgcaatcggacacagttatgatgtattcggattttacgccaaccccaagagcgttaatacacagctcttcgaccttgcccctcagcaagaaattattttagaggaccacaaatggctcctctccactgatattgaatatattgctgtccgagaaaccgaaataaaaaccgtctctcttcgtacaaaggatgcatactccacggagctggctgcaagcgtaaaagtgtccggcagctatggcagcttctcggcttcgatagagtctgatttctcccaaagcatcagcgatgagactgattccacttacacttctgttcgtacaaatgtgaacaagtggaagctcagtctgaagccaactgtggaagaactgcgttccatgttgacaccttcgttcaaggaagctttggcgagtatagactcggaggagctgtttacgacgtacgggacacattatctgagtgaggtgttggtgggaggtcgcgcagattatgtcgccaccaccaaaaccagtgcattcagctctgatattcaaatcagcgtagttgcggagtgttcattcaagtccgtggctggcatggacgtatcagccaagtacaaggagcttatccagaaattccaagagaacagctccactagtctgtacgccatcggtgggaccacaatctccagcatcacagacaaagacacttacaatgcatggctcagttcgattgatacacgtcccgtcttctgtggattcacttacgaaagtcttcagcccatttgggaacttgctgaatcccctcagcgccaggagatcctgcaaaaggctacgaagacctttatttcgcccgaaatcaaacgaaatgcaatcgtcgacgtagatattatcgtgtccgacaactatggggtgaatcctccctacggctatacgaagatcgattatgatctgaaccgcaatgccaagggcaaatttatctttttgtgctacaatcaacagaagatatcagtagcaggatcccctgcggatccgaagcccatcactgttttgtacgtggcttctggcgatgacgatcatccatacgttcctccaggttacaccaggatcagcagcgatctgaacgagggtgcggggggcaaatttatctatctatgctacacaaaagatccggctgcaatacccatcgacgaggatggactgcccatacgtggcatccgcgttattggtaacgaaaatatcgagaatgtggttacaccttacggattcacaacgattgataaagatctgaacgagggtgcagggggagactttatcttcgttcgtttctcacctcatttagac

SEQ ID NO: 26 - protein, 451 aa, Lycopodium nummulariifolium
MARIEPLPGSDAIGHSYDVFGFYANPKSVNTQLFDLAPQQEIILEDHKWLLSTDIEYIAVRETEIKTVSLRTKDAYSTELAASVKVSGSYGSFSASIESDFSQSISDETDSTYTSVRTNVNKWKLSLKPTVEELRSMLTPSFKEALASIDSEELFTTYGTHYLSEVLVGGRADYVATTKTSAFSSDIQISVVAECSFKSVAGMDVSAKYKELIQKFQENSSTSLYAIGGTTISSITDKDTYNAWLSSIDTRPVFCGFTYESLQPIWELAESPQRQEILQKATKTFISPEIKRNAIVDVDIIVSDNYGVNPPYGYTKIDYDLNRNAKGKFIFLCYNQQKISVAGSPADPKPITVLYVASGDDDHPYVPPGYTRISSDLNEGAGGKFIYLCYTKDPAAIPIDEDGLPIRGIRVIGNENIENVVTPYGFTTIDKDLNEGAGGDFIFVRFSPHLD

SEQ ID NO: 27 - DNA, 1353 bp, Lycopodium nummulariifolium
atggcccgtatcgagccattacctggatcggatgcaatcggacacagttatgatgtattcggattttacgccaaccccaagagcgttaatacacagctcttcgactttgcccctcagcaagaaattattttagaggaccacaaatggctcctctccactgatattgaatatattgctgttcgagatacggaaataaaaaccgtctctcttcgtacaaaagatgcatactccacggagctggctgcgagcgtaaaagtgtccggcagctatggcagcttctcggcttcggtagagtctgatttctcccaaagcatcagcgatgagacggattccacttacacttctgttcgtacaaatgtgaacaagtggaagctcagtctgaagccaactgtggaagaactgcgttctatgttgacaccttcgttcaaggaagctttggcgagtatggactcggaggagctgtttacgacgtacgggacacattatctgagtgaggtgttggtgggaggtcgcgcagattatgtcgccaccaccaaaaccagtgcattcagctctgatattcaaatcagcgtagttgcggagtgttcattcaagtccgtggctggcatggacgtatcagccaagtacaaggagcttatccagaaattccaagagaacagctccactagtctgtacgccatcggtgggaccacaatctccagcatcacagacaaagacacttacaatgcatggctcagttcgattgatacacgtcccgtcttctgtggattcacttacgaaagtcttcagcccatttgggaactcgctgaatcccctcagcgccaggagatcctgcaaaaggctacgaagacctttattccgcccgaaatcaaacgaaatgcaatcgtcgacgtagatattatcgtgtccgacaactatggggtgaatcctccctacggctatacgaagatcgattatgatctgaaccgcaatgccaagggcaaatttatctttttgtgctacaatcaacagaagatatcagtagcaggatcccctgcggatccgaagcccatcactgctttgtacgtggcttctggcgatgacgatcatccatacgttcctccaggttacaccaggatcagcagcgatctgaacgagggtgcggggggcaaatttatctatctatgctacacaaaagatccggctgcaatacccagcgacgaggatggactgcccatacgtggcatctgcgttattggtaacgaaaatatcgagaatgtggttacaccttacggattcacgaagattgataaagatctgaacgagggtgcagggggagactttatcttcgttcgtttctcacctcatttagac

SEQ ID NO: 28 - protein, 451 aa, Lycopodium nummulariifolium
MARIEPLPGSDAIGHSYDVFGFYANPKSVNTQLFDFAPQQEIILEDHKWLLSTDIEYIAVRDTEIKTVSLRTKDAYSTELAASVKVSGSYGSFSASVESDFSQSISDETDSTYTSVRTNVNKWKLSLKPTVEELRSMLTPSFKEALASMDSEELFTTYGTHYLSEVLVGGRADYVATTKTSAFSSDIQISVVAECSFKSVAGMDVSAKYKELIQKFQENSSTSLYAIGGTTISSITDKDTYNAWLSSIDTRPVFCGFTYESLQPIWELAESPQRQEILQKATKTFIPPEIKRNAIVDVDIIVSDNYGVNPPYGYTKIDYDLNRNAKGKFIFLCYNQQKISVAGSPADPKPITALYVASGDDDHPYVPPGYTRISSDLNEGAGGKFIYLCYTKDPAAIPSDEDGLPIRGICVIGNENIENVVTPYGFTKIDKDLNEGAGGDFIFVRFSPHLD

SEQ ID NO: 29 - DNA, 1353 bp, Lycopodium nummulariifolium
atggtccgtatcgagccattacctggatcggatgcaatcggacacagttatgatgtattcggattttacgccaaccccaagagcgttaatacacagctcttcgactttgcccctcaggaagaaattattttagaggaccacaaatggctcctctccactgatattgaatatattgctgtccgagatacggaaataaaaaccgtctctcttcgtacaaaagatgcatactccacggagctggctgcaagcgtaaaagtgtccggcagctatggcagcttctcggcttcggtagagtctgatttctcccaaagcatcagcgatgagactgattccacttacacttctgttcgtacaaatgtgaacaagtggaagctcagtctgaagccaactgtggaagaactgcgttccatgttgacaccttcgttcaaggaagctttggcgagtatggactcggaggagctgtttacgacgtacgggacacattatctgagtgaggtgttggtgggaggtcgcgcagattatgtcgccaccaccaaaaccagtgcattcagctctgatattcaaatcagcgtagttgcggagtgttcattcaagtccgtggctggcatggacgtatcagccaagtacaaggagcttatccagaaattccaagagaacagctccactagtctgtacgccatcggtgggaccacaatctccagcatcacagacaaagacacttacaatgcatggctcagttcgattgatacacgtcccgtcttctgtggattcacttacgaaagtcttcagcccatttgggaactcgctgaatcccctcagcgccaggagatcctgcaaaacgctacgaagacctttattccacccgaaatcaaacgaaatgcaatcgtcgacgtagatattatcgtgtccgacaactatggggtgaatcctccctacggctatacgaagatcgattatgatctgaaccacaatgccaagggcaaatttatctttttgtgctacaatcaacagaagatatcagtagcaggatcccctgcggatccgaagcccatcactgccttgtacgtggcttctggcgatgacgatcatccatacgttcctccaggctataccaggatcagcagcgatctgaacgagggtgcggggggcaaatttatctatctatgctacacaaaagatccggctgcaatacccagcgacgaggatggactgcccatacgtggcatccgcgttattggtaacgaaaatatcgacaatgtggttacaccttacggattcacgaagattgataaagatctgaacgagggtgcagggggggactttatcttcgttcgtttctcacctcatttagac

SEQ ID NO: 30 - protein, 451 aa, Lycopodium nummulariifolium
MVRIEPLPGSDAIGHSYDVFGFYANPKSVNTQLFDFAPQEEIILEDHKWLLSTDIEYIAVRDTEIKTVSLRTKDAYSTELAASVKVSGSYGSFSASVESDFSQSISDETDSTYTSVRTNVNKWKLSLKPTVEELRSMLTPSFKEALASMDSEELFTTYGTHYLSEVLVGGRADYVATTKTSAFSSDIQISVVAECSFKSVAGMDVSAKYKELIQKFQENSSTSLYAIGGTTISSITDKDTYNAWLSSIDTRPVFCGFTYESLQPIWELAESPQRQEILQNATKTFIPPEIKRNAIVDVDIIVSDNYGVNPPYGYTKIDYDLNHNAKGKFIFLCYNQQKISVAGSPADPKPITALYVASGDDDHPYVPPGYTRISSDLNEGAGGKFIYLCYTKDPAAIPSDEDGLPIRGIRVIGNENIDNVVTPYGFTKIDKDLNEGAGGDFIFVRFSPHLD

SEQ ID NO: 31 - DNA, 1353 bp, Lycopodium nummulariifolium
atggcccgtatcgagccattacctggatcggatgcaatcggacacagttatgatgtattcggattttacgccaaccccaagagcgttaatacacagctcttcgactttgcccctcagcaagaaattattttagaggaccacaaatggctcctctccactgatattgaatatattgctgttcgagatacggaaataaaaaccgtctctcttcgtacaaaagatgcatactccacggagctggctgcgagcgtaaaagtgtccggcagctatggcagcttctcggcttcggtagagtctgatttttcccaaagcatcagcgatgagacggattccacttacacttctattcgtacaaatgtgaacaagtggaagctcagtctgaagccaactgtggaagaactgcgttccatgttgacaccttcgttcaagcaagctttggcgagtatgaactcggaggagctgtttacgacgtacgggacacattatctgagtgaggttttggtgggtggtcgcgcagattatgtcgccaccaccaaaaccagtgcattcagctctgatattcaaatcagcgtaggtgcggagtgttcattcaagtccgtggttggcatggacgtatcagccaagtacaaggagcttatccagaaattccaagagaacagctccactagtctgtacgccatcggtgggaccgcaatctccagcatcacagacacggacacttacaatgcatggctcagttcgattgatacacgtcccgtcttctgtggattcacttacgaaagtcttcagcccatttgggaactcgctgaatcccctcagcgccaggagatcctccaaaaggctacgaagacctttatttcgcccgaaatcaaacgcaatgcaatcgtcgacgtagatattatcgtgtccgacaactatggggtgaatcctccctacggctatacgaagatcgattatgatctgaaccgcaatgccaagggcaaatttatctttttgtgctacaatcaacagaagatatcagtagcaggatcccctgcggatccgaagcccatcactgctttgtacgtggcttctggcgatgacgatcatccatacgttcctccaggctataccaggatcagcagcgatctgaacgagggtgcggggggcaaatttatctatctatgctacacaaaagatccggctgcaatacccagcgacgaggatggactgcccatacgtggcatccgcgttattggtaacgaaaatatcgagaatgtggttacaccttacggattcacgaagattgataaagatctgaacgagggtgcagggggagactttatcttcgttcgtttctcacctcatttagac

SEQ ID NO: 32 - protein, 451 aa, Lycopodium nummulariifolium
MARIEPLPGSDAIGHSYDVFGFYANPKSVNTQLFDFAPQQEIILEDHKWLLSTDIEYIAVRDTEIKTVSLRTKDAYSTELAASVKVSGSYGSFSASVESDFSQSISDETDSTYTSIRTNVNKWKLSLKPTVEELRSMLTPSFKQALASMNSEELFTTYGTHYLSEVLVGGRADYVATTKTSAFSSDIQISVGAECSFKSVVGMDVSAKYKELIQKFQENSSTSLYAIGGTAISSITDTDTYNAWLSSIDTRPVFCGFTYESLQPIWELAESPQRQEILQKATKTFISPEIKRNAIVDVDIIVSDNYGVNPPYGYTKIDYDLNRNAKGKFIFLCYNQQKISVAGSPADPKPITALYVASGDDDHPYVPPGYTRISSDLNEGAGGKFIYLCYTKDPAAIPSDEDGLPIRGIRVIGNENIENVVTPYGFTKIDKDLNEGAGGDFIFVRFSPHLD

SEQ ID NO: 33 - DNA, 1353 bp, Lycopodium nummulariifolium
atggcccgtatcgagccattacctggatcggatgcaatcggacacagttatgatgtgttcggattttatgccaatccaaagagcgtgaagaaagagctcttcgactttgccctccagaaagaaatcactttagagggccacacttggctcctttccactgatattgaatatattgcagttcgagatacggaaataaaaaccgtctctcttcgcacaaaagatgcatactcaagcgagctggctgcaagcgtaaaactgtccggcagctatggcggattctcagcgtcggtagaatctgacttctcccaaagcatcagcgatgagacggattccacttacacttcagttcgtacaaatgtgaacaagtggaagctcagtctgaagcacactgtggaagagctacgctccaagttgaagcctgcgttgaaggaggcgttggcgaatatgaaagaagtggagctgttgagtacgtacgggacacattatatgggcgaggtgttggtgggaggtcgtgcagattatttggccaccaccaaaaccagtgcattcagctcggacactaaaatcagcacagtagcggagagttctttcaagtccgtagctggcatgaaagtatccgcggagcaaaagcagcttatcgaaaaattccaagaaaacagctccaccagtctgtacgccatcggtgggagcgcactctccagcatcacagacacggccacttacaacgcatggctcagttcgattgatacacgtcccgtcttctgtggattcactcgcgacagtcttaggcccatctgggagctcgctgaatcccctcagcgccgggagattctccgaaaagctacccaaacgtttatcccaccagaaatcacacgaaatgcagtcgttggcgtagatattatcatgtctgaaaactattgggtgaatcctccgtacggctatacgaagatcgattacgatctgaatcgcaatgccaagggcaaatatatcttcttgtgttacaaacaacagaagatatcagtagctggatccccagcggatcccaagcccatcactgccttgtacgtggcttctggcgatgatgataatccatatgttcctccaggttacaccaagatcgaccaagatctgaacaaggatgctgggggcaagtttatctatctctcttacacaaaagatccagctgcaatacccaacgacgaggatggactgcccatacgtggcatccgcgttatcggcaatgaaaagcttgagaatgtggttacaccgtacggattcacgaggattgatgaagatctgaataaggatgcaaagggagactatatcttcgttcgtttctcacctcatttagac

SEQ ID NO: 34 - protein, 451 aa, Lycopodium nummulariifolium
MARIEPLPGSDAIGHSYDVFGFYANPKSVKKELFDFALQKEITLEGHTWLLSTDIEYIAVRDTEIKTVSLRTKDAYSSELAASVKLSGSYGGFSASVESDFSQSISDETDSTYTSVRTNVNKWKLSLKHTVEELRSKLKPALKEALANMKEVELLSTYGTHYMGEVLVGGRADYLATTKTSAFSSDTKISTVAESSFKSVAGMKVSAEQKQLIEKFQENSSTSLYAIGGSALSSITDTATYNAWLSSIDTRPVFCGFTRDSLRPIWELAESPQRREILRKATQTFIPPEITRNAVVGVDIIMSENYWVNPPYGYTKIDYDLNRNAKGKYIFLCYKQQKISVAGSPADPKPITALYVASGDDDNPYVPPGYTKIDQDLNKDAGGKFIYLSYTKDPAAIPNDEDGLPIRGIRVIGNEKLENVVTPYGFTRIDEDLNKDAKGDYIFVRFSPHLD

SEQ ID NO: 35 - DNA, 1353 bp, Lycopodium nummulariifolium
atggcccgtatcgagccattacctggatcggatgcaatcggacacagttatgatgtattcggattttacgccaaccccaagagcgttaatacacagctcttcgactttgcccctcagcaagaaattattttagaggaccacaaatggctcctctccactgatattgaatatattgctgtccgagatacggaaataaaaaccgtctctcttcgtacaaaggatgcatactccacggagctggctgcaagcgtaaaagtgtccggcagctatggcagcttctcggcttcggtagagtctgatttctcccaaagcatcagcgatgagactgattccacttatacttctgttcgtacaaatgtgaacaagtggaagctcagtctgaagccaactgtggaagaactgcgttctatgttgacaccttcgttcaaggaagctttggcgagtatggactcggaggagctgtttacgacgtacgggacacattatctgagtgaggtgttggtgggaggtcgcgcagattatgtcgccaccaccaaaaccagtgcattcagctctgatattcaaatcagcgtagttgcggagtgttcattcaagtccgtggctggcatggacgtatcagccaagtacaaggagcttatccagaaattccaagagaacagctccactagtctgtacgccatcggtgggaccacaatctccagcatcacagacaaagacacttacaatgcatggctcagttcgattgatacacgtcccgtcttctgtggattcacttacgaaagtcttcagcccatttgggaactcgctgaatcccctcagcgccaggagatcctgcaaaaggctacgaagacctttattccgcccgaaatcaaacgaaatgcaatcgtcgacgtagatattatcgtgtccgacaactatggggtgaatcctccctacagctatacgaagatcgattatgatctgaaccacaatgccaagggcaaatttatctttttgtgctacaatcaacagaagatatcagtagcaggatcccctgcggatccgaagcccatcactgccttgtacgtggcttctggcgatgacgatcatccatacgttcctccaggctataccaggatcagcagcgatctgaacgagggtgcggggggcaaatttatctatctatgctacacaaaagatccggctgcaatacccagcgacgaggatggactgcccatacgtggcatccgcgttattggtaacgaaaatatcgacaatgtggttacaccttacggattcacgaagattgataaagatctgaacgagggtgcagggggagactttatctacgttcgtttctcacctcatttagac

SEQ ID NO: 36 - protein, 451 aa, Lycopodium nummulariifolium
MARIEPLPGSDAIGHSYDVFGFYANPKSVNTQLFDFAPQQEIILEDHKWLLSTDIEYIAVRDTEIKTVSLRTKDAYSTELAASVKVSGSYGSFSASVESDFSQSISDETDSTYTSVRTNVNKWKLSLKPTVEELRSMLTPSFKEALASMDSEELFTTYGTHYLSEVLVGGRADYVATTKTSAFSSDIQISVVAECSFKSVAGMDVSAKYKELIQKFQENSSTSLYAIGGTTISSITDKDTYNAWLSSIDTRPVFCGFTYESLQPIWELAESPQRQEILQKATKTFIPPEIKRNAIVDVDIIVSDNYGVNPPYSYTKIDYDLNHNAKGKFIFLCYNQQKISVAGSPADPKPITALYVASGDDDHPYVPPGYTRISSDLNEGAGGKFIYLCYTKDPAAIPSDEDGLPIRGIRVIGNENIDNVVTPYGFTKIDKDLNEGAGGDFIYVRFSPHLD

SEQ ID NO: 37 - DNA, 1353 bp, Lycopodium nummulariifolium
atggcccgtatcgagccattacctggatcggatgcaatcggacacagttatgatgtattcggattttacgccaaccccaggagcgttaatacacagctcttcgactttgcccctcagcaagaaattattttagaggaccacaaatggctcctctccactgatattgaatatattgctgtccgagaaaccgaaataaaaaccgtctctcttcgtacaaaagatgcatactccacggagctggctgcaagcgtaaaagtgtccggcagctatggcagcttctcggcttcggtagagtctgatttctcccaaagcatcagcgatgagacggattccacttatacttctgttcgtacaaatgtgaacaagtggaagctcagtctgaagccaactgtggaagaactgcgttccatgttgacaccttcgttcaaggaagctttggcgagtatggacttggaggagctgtttacgacgtacgggacacattatctgagtgaggtgttggtgggaggtcgcgcagattatgtcgccaccaccaaaaccagtgcattcagctctgagattcaaatcagcgtagttgcggagtgttcattcaagtccgtggctggcatggacgtatcagccaagtacaaggagcttatccagaaattccaagagaacagctccactagtctgtacgccatcggtgggaccacaatctccagcatcacagacaaagacacttacaatgcatggctcagttcgattgatacacgtcccgtcttctgtggattcacttacgaaagtcttcagcccatttgggaactcgctgaatcccctcagcgccaggagatcctgcaaaaggctacgaagacctttattccgcccgaaatcaaacgaaatgcaatcgtcgacgtagatattatcgtgtccgacaactatggggtgaatcctccctacagctatacgaagatcgattatgatctgaaccacaatgccaagggcaaatttatctttttgtgctacaatcaacagaagatatcagtagcaggatcccctgcggatccgaagcccatcactgccttgtacgtggcttctggcgatgacgatcatccatacgttcctccaggctataccaggatcagcagcgatctgaacgagggtgcggggggcaaatttatctatctatgctacacaaaagatccggctgcaatacccagcgacgaggatggactgcccatacgtggcatccgcgttattggtaacgaaaatatcgacaatgtggttacaccttacggattcacgaagattgataaagatctgaacgagggtgcagggggagactttatcttcgttcgtttctcacctcatttagac

SEQ ID NO: 38 - protein, 451 aa, Lycopodium nummulariifolium
MARIEPLPGSDAIGHSYDVFGFYANPRSVNTQLFDFAPQQEIILEDHKWLLSTDIEYIAVRETEIKTVSLRTKDAYSTELAASVKVSGSYGSFSASVESDFSQSISDETDSTYTSVRTNVNKWKLSLKPTVEELRSMLTPSFKEALASMDLEELFTTYGTHYLSEVLVGGRADYVATTKTSAFSSEIQISVVAECSFKSVAGMDVSAKYKELIQKFQENSSTSLYAIGGTTISSITDKDTYNAWLSSIDTRPVFCGFTYESLQPIWELAESPQRQEILQKATKTFIPPEIKRNAIVDVDIIVSDNYGVNPPYSYTKIDYDLNHNAKGKFIFLCYNQQKISVAGSPADPKPITALYVASGDDDHPYVPPGYTRISSDLNEGAGGKFIYLCYTKDPAAIPSDEDGLPIRGIRVIGNENIDNVVTPYGFTKIDKDLNEGAGGDFIFVRFSPHLD

SEQ ID NO: 39 - DNA, 1353 bp, Lycopodium nummulariifolium
atggcccgtatcgagccattacctggatcggatgcaatcggacacagttatgatgtattcggattttacgccaaccccaagagcgttaatacacagctcttcgactttgcccctcagcaagaaattattttagaggaccacaaatggctcctctccactgatattgaatatattgctgtccgagaaaccgaaataaaaaccgtctctcttcgtacaaaagatgcatactccacggagctggctgcaagcgtaaaagtgtccggcagctatggcagcttctcggcttcggtagagtctgatttctcccaaagcatcagcgatgagacggattccacttacacttctgttcgtacaaatgtgaacaagtggaagctcagtctgaagccaactgtggaagaactgcgttccatgttgacaccttctttcaaggaagctttggcgagtatggactcggaggagctgtttacgacgtacgggacacattatctgagtggggtgttggtgggaggtcgcgcagattatgtcgccaccaccaaaaccagtgcattcagctctgatattcaaatcagcgtagttgcggagtgttcattcaagtccgtggctggcatggacgtatcagccaagtacaaggagcttatccagaaattccaagagaacagctccactagtctgtacgccatcggtgggaccacaatctccagcatcacagacaaagacacttacaatgcatggctcagttcgattgatatacgtcccgtcttctgtggattcacttacgaaagtcttcagcccatttgggaactcgctgaatcccctcagcgccaggagatcctgcaaaaggctacgaagacctttattccgcccgaaatcaaacgaaatgcaatcgtcgacgtagatattatcgtgtccgacaactatggggtgaatcctccctacggctatacgaagatcgattatgatctgaaccgcaatgccaagggcaaatttatctttttgtgctacaatcaacagaagatatcagtagcaggatcccctgcggatccgaagcccatcactgctttgtacgtggcttctggcgatgacgatcatccatacgttcctccaggttacaccaggatcagcagcgatctgaacgagggtgcggggggcaaatttatctatctatgctacacaaaagatccggctgcaatacccagcgacgaggatggactgcccatacgtggcatccgagttattggtaacgaaaatatcgagaatgtggttacaccttacggattcacaacgattgataaagatctgaacgagggtgcagggggagactttatctacgttcgtttctcacctcatttagac

SEQ ID NO: 40 - protein, 451 aa, Lycopodium nummulariifolium
MARIEPLPGSDAIGHSYDVFGFYANPKSVNTQLFDFAPQQEIILEDHKWLLSTDIEYIAVRETEIKTVSLRTKDAYSTELAASVKVSGSYGSFSASVESDFSQSISDETDSTYTSVRTNVNKWKLSLKPTVEELRSMLTPSFKEALASMDSEELFTTYGTHYLSGVLVGGRADYVATTKTSAFSSDIQISVVAECSFKSVAGMDVSAKYKELIQKFQENSSTSLYAIGGTTISSITDKDTYNAWLSSIDIRPVFCGFTYESLQPIWELAESPQRQEILQKATKTFIPPEIKRNAIVDVDIIVSDNYGVNPPYGYTKIDYDLNRNAKGKFIFLCYNQQKISVAGSPADPKPITALYVASGDDDHPYVPPGYTRISSDLNEGAGGKFIYLCYTKDPAAIPSDEDGLPIRGIRVIGNENIENVVTPYGFTTIDKDLNEGAGGDFIYVRFSPHLD

SEQ ID NO: 41 - DNA, 1353 bp, Lycopodium nummulariifolium
atggcccgtatcgagccattacctggatcggatgcaatcggacacagttatgatgtgttcggattttatgccaatccaaagagcgtgaagaaagagctcttcgactttgccctccagaaagaaatcactttagagggccacacttggctcctttccactgatattgaatatattgcagttcgagatacggaaataaaaaccgtctctcttcgcacaaaagatgcatactcaagcgagctggctgcaagcgtaaaactgtccggcagctatggcggattctcagcgtcggtagaatctgacttctcccaaagcatcatcgatgagacggattccacttacacttcagttcgtacaaatgtgaacaagtggaagctcagtctgaagcacactgtggaagagctacgctccaagttgaagcctgcgttgaaggaggcgttggcgaatatgaaagaagtggagctgttgagtacgtacgggacacattatatgggcgaggtgttggtgggaggtcgtgcagattatttggccaccaccaaaaccagtgcattcagctcggacactaaaatcagcacagtagcggagagttctttcaagtccgtagctggcatgaaagtatccgcggagcaaaagcagcttatcgaaaaattccaagaaaacagctccaccagtctgtacgccatcggtgggagcgcactctccagcatcacagacacggccacttacaacgcatggctcagttcgattgatacacgtcccgtcttctgtggattcactcgcgacagtcttaggcccatctgggagctcgctgaatcccctcagcgccaggagatcctccaaaaggctacgaaggcctttatttcgcccgaaatcaaacgaaatgcaatcgtcgacgtagatattatcgtgtccgacaactatggggtgaatcctccctacggctatacgaagatcgattatgatctgaaccgcaatgccaagggcaaatttatctttttgtgctacaatcaacagaagatatcagtagcaggatcccctgcggatccgaagcccatcactgccttgtacgtggcttctggcgatgacaataatccatacattcctccaggttataccaggatcaacagcgatctgaacgagggtgcggggggcaaatttatttatctatgctacacaaaagatccggctgcaatacccagcgacgaggatggactgcccatacgtggcatccgcgttattggtaacgaaaatggcgagaatgtggttacaccttacggattcacgaagattgataaagatctgaacgagggtgcagggggagattatatcttcgttcgtttctcacctcatttagac

SEQ ID NO: 42 - protein, 451 aa, Lycopodium nummulariifolium
MARIEPLPGSDAIGHSYDVFGFYANPKSVKKELFDFALQKEITLEGHTWLLSTDIEYIAVRDTEIKTVSLRTKDAYSSELAASVKLSGSYGGFSASVESDFSQSIIDETDSTYTSVRTNVNKWKLSLKHTVEELRSKLKPALKEALANMKEVELLSTYGTHYMGEVLVGGRADYLATTKTSAFSSDTKISTVAESSFKSVAGMKVSAEQKQLIEKFQENSSTSLYAIGGSALSSITDTATYNAWLSSIDTRPVFCGFTRDSLRPIWELAESPQRQEILQKATKAFISPEIKRNAIVDVDIIVSDNYGVNPPYGYTKIDYDLNRNAKGKFIFLCYNQQKISVAGSPADPKPITALYVASGDDNNPYIPPGYTRINSDLNEGAGGKFIYLCYTKDPAAIPSDEDGLPIRGIRVIGNENGENVVTPYGFTKIDKDLNEGAGGDYIFVRFSPHLD

SEQ ID NO: 43 - DNA, 1353 bp, Lycopodium nummulariifolium
atggcccgtatcgagccattacctggatcggatgcaatcggacacagttatgatgtattcggattttacgccaaccccaggagcgttaatacacagctcttcgactttgcccctcagcaagaaattattttagaggaccacaaatggctcctctccactgatattgaatatattgctgttcgagatacggaaataaaaaccgtctctcttcgtacaaaagatgcatactccacggagctggctgcgagcgtaaaagtgtccggcagctatggcagcttctcggcttcggtagagtctgatttttcccaaagcatcagcgatgagacggattccacttacacttctattcgtacaaatgtgaacaagtggaagctcagtctgaagccaactgtggaagaactgcgttccatgttgacaccttcgttcaagcaagctttggcgagtatgaactcggaggagctgtttacgacgtacgggacacattatctgagtgaggttttggtgggtggtcgcgcagattatgtcgccaccaccaaaaccagtgcattcagctctgatattcaaatcagcgtaggtgcggagtgttcattcaagtccgtggctggcatggacgtatcagccaagtacaaggagcttatccagaaattccaagagaacagctccactagtctgtacgccatcggtgggaccacaatctccagcatcacagacaaagacacttacaatgcatggctcagttcgattgatacacgtcccgtcttctgtggattcacttacgaaagtcttcagcccatttgggaactcgctgaatcccctcagcgccaggagatcctccaaaaggctacgaagacctttatttcgcccgaaatcaaacgaaatgcaatcgtcgacgtagatattatcgtgtccgacaactatggggtgaatcctccctacggctatacgaagatcgattatgatctgaaccgcaatgccaagggcaaatttatctttttgtgctacaatcaacagaagatatcagtagcaggatcccctgcggatccgaagcccatcactgccttgtacgtggcttctggcgatgacgatcatccatacgttcctccaggctataccaggatcagcagcgatctgaacgagggtgcggggggcaaatttatctatctatgctacacaaaagatccggctgcaatacccagcgacgaggatggactgcccatacgtggcatccgcgttattggtaacgaaaatatcgacaatgtggttacaccttacggattcacgaagattgataaagatctgaacgagggtgcagggggagactttatcttcgttcgtttctcacctcatttagac

SEQ ID NO: 44 - protein, 451 aa, Lycopodium nummulariifolium
MARIEPLPGSDAIGHSYDVFGFYANPRSVNTQLFDFAPQQEIILEDHKWLLSTDIEYIAVRDTEIKTVSLRTKDAYSTELAASVKVSGSYGSFSASVESDFSQSISDETDSTYTSIRTNVNKWKLSLKPTVEELRSMLTPSFKQALASMNSEELFTTYGTHYLSEVLVGGRADYVATTKTSAFSSDIQISVGAECSFKSVAGMDVSAKYKELIQKFQENSSTSLYAIGGTTISSITDKDTYNAWLSSIDTRPVFCGFTYESLQPIWELAESPQRQEILQKATKTFISPEIKRNAIVDVDIIVSDNYGVNPPYGYTKIDYDLNRNAKGKFIFLCYNQQKISVAGSPADPKPITALYVASGDDDHPYVPPGYTRISSDLNEGAGGKFIYLCYTKDPAAIPSDEDGLPIRGIRVIGNENIDNVVTPYGFTKIDKDLNEGAGGDFIFVRFSPHLD

SEQ ID NO: 45 - DNA, 1353 bp, Lycopodium nummulariifolium
atggcccgtatcgagccattacctggatcggatgcaatcggacacagttatgatgtattcggattttacgccaaccccaagagcgttaatacacagctcttcgactttgcccctcagcaagaaattattttagaggaccacaaatggctcctctccactgatattgaatatattgctgttcgagatacggaaataaaaaccgtctctcttcgtacaaaagatgcatactccacggagctggctgcaagcgtaaaagtgtccggcagctatggcagcttctcggcttcggtagagtctgatttctcccaaagcatcagcgatgagacggattccacttatacttctgttcgtacaaatgtgaacaagtggaagctcagtctgaagccaactgtggaagaactgcgttccatgttgacaccttcgttcaaggaagctttggcgagtatggacttggaggagctgtttacgacgtacgggacacattatctgagtgaggtgttggtgggaggtcgcgcagattatgtcgccaccaccaaaaccagtgcattcagctctgagattcaaatcagcgtagttgcggagtgttcattcaagtccgtggctggcatggacgtatcagccaagtacaaggagcttatccagaaattccaagagaacagctccactagtctgtacgccatcggtgggaccacaatctccagcatcacagacaaagacacttacaatgcatggctcagttcgattgatacacgtcccgtcttctgtggattcacttacgaaagtcttcagcccatttgggaactcgctgaatcccctcagcgccaggagatcctgcaaaaggctacgaagacctttatttcgcccgaaatcaaacgcaatgcaatcgtcgacgtagatattatcgtgtccgacaactatggggtgaatcctccctacggctatacgaagatcgattatgatctgaaccgcaatgccaagggcaaatttatctttttgtgctacaatcaacagaagatatcagtagcaggatcccctgcggatccgaagcccatcactgctttgtacgtggcttctggcgatgacgatcatccatacgttcctccaggctataccaggatcagcagcgatctgaacgagggtgcggggggcaaatttatctatctatgctacacaaaagatccggctgcaatacccagcgacgaggatggactgcccatacgtggcatccgcgttattggtaacgaaaatggcgagaatgtggttacaccttacggattcacgaagattgataaagatctgaacgagggtgcagggggagattatatcttcgttcgtttctcacctcatttagac

SEQ ID NO: 46 - protein, 451 aa, Lycopodium nummulariifolium
MARIEPLPGSDAIGHSYDVFGFYANPKSVNTQLFDFAPQQEIILEDHKWLLSTDIEYIAVRDTEIKTVSLRTKDAYSTELAASVKVSGSYGSFSASVESDFSQSISDETDSTYTSVRTNVNKWKLSLKPTVEELRSMLTPSFKEALASMDLEELFTTYGTHYLSEVLVGGRADYVATTKTSAFSSEIQISVVAECSFKSVAGMDVSAKYKELIQKFQENSSTSLYAIGGTTISSITDKDTYNAWLSSIDTRPVFCGFTYESLQPIWELAESPQRQEILQKATKTFISPEIKRNAIVDVDIIVSDNYGVNPPYGYTKIDYDLNRNAKGKFIFLCYNQQKISVAGSPADPKPITALYVASGDDDHPYVPPGYTRISSDLNEGAGGKFIYLCYTKDPAAIPSDEDGLPIRGIRVIGNENGENVVTPYGFTKIDKDLNEGAGGDYIFVRFSPHLD

SEQ ID NO: 47 - DNA, 1353 bp, Lycopodium nummulariifolium
atggcccgtatcgagccattacctggatcggatgcaatcggacacagttatgatgtattcggattttacgccaaccccaagagcgttaatacacagctcttcgactttgcccctcagcaagaaattattttagaggaccacaaatggctcctctccactgatattgaatatattgctgtccgagaaaccgaaataaaaaccgtctctcttcgtacaaaagatgcatactccacggagctggctgcaagcgtaaaagtgtccggcagctatggcagcttctcggcttcggtagagtctgatttctcccaaagcatcagcgatgagacggattccacttatacttctgttcgtacaaatgtgaacaagtggaagctcagtctgaagccaactgtggaagaactgcgttccatgttgacaccttcgttcaaggaagctttggcgagtatggactcggatgagctgtttacgacgtacgggacacattatctgagtgaggtgttggtgggaggtcgcgcagattatgtcgccaccaccaaaaccagtgcattcagctctgatattcaaatcagcgtagttgcggagtgttcattcaagtccgtggctggcatggacgtatcagccaagtacaaggagcttatccagaaattccaagagaacagctctactagtctgtacgccatcggtgggaccacaatctccagcatcacagacaaagacacttacaatgcatggctcagttcgattgatacacgtcccgtcttctgtggattcacttacgaaagtcttcagcccatttgggaactcgctgaatcccctcaacgccaggagatcctgcaaaaggctacgaagacctttatttcgcccgaaatcaaacgaaatgcaatcgtcgacgtagatattatcgtgtccgacaactatggggtgaatcctccctacggctatacgaagatcgattatgatctgaaccgcaatgccaagggcaaatttatctttttgtgctacaatcaacagaagatatcagtagcaggatcccctgcggatccgaagcccatcactgttttgtacgtggcttctggcgatgacgatcatccatacgttcctccaggttacaccaggatcagcagcgatctgaacgagggtgcgggggggaaatttatctatctatgctacacaaaagatccggctgcaatacccatcgacgaggatggactgcccatacgtggcatccgcgttattggtaacgaaaatatcgagaatgtggttacaccttacggattcacaacgattgataaagatctgaacgagggtgcagggggagactttatcttcgttcgtttctcacctcatttagac

SEQ ID NO: 48 - protein, 451 aa, Lycopodium nummulariifolium
MARIEPLPGSDAIGHSYDVFGFYANPKSVNTQLFDFAPQQEIILEDHKWLLSTDIEYIAVRETEIKTVSLRTKDAYSTELAASVKVSGSYGSFSASVESDFSQSISDETDSTYTSVRTNVNKWKLSLKPTVEELRSMLTPSFKEALASMDSDELFTTYGTHYLSEVLVGGRADYVATTKTSAFSSDIQISVVAECSFKSVAGMDVSAKYKELIQKFQENSSTSLYAIGGTTISSITDKDTYNAWLSSIDTRPVFCGFTYESLQPIWELAESPQRQEILQKATKTFISPEIKRNAIVDVDIIVSDNYGVNPPYGYTKIDYDLNRNAKGKFIFLCYNQQKISVAGSPADPKPITVLYVASGDDDHPYVPPGYTRISSDLNEGAGGKFIYLCYTKDPAAIPIDEDGLPIRGIRVIGNENIENVVTPYGFTTIDKDLNEGAGGDFIFVRFSPHLD

SEQ ID NO: 49 - DNA, 1353 bp, Lycopodium nummulariifolium
atggcccgtatcgagccattacctggatcggatgcaatcggacacagttatgatgtattcggattttacgccaaccccaagagcgttaatacacagctcttcgactttgcccctcagcaagaaattattttagaggaccacaaatggctcctctccactgatattgaatatattgctgtccgagaaaccgaaataaaaaccgtctctcttcgtacaaaagatgcatactccacggagctggctgcaagcgtaaaagtgtccggcagctatggcagcttctcggcttcggtagagtctgatttctcccaaagcatcagcgatgagacggattccacttatacttctgttcgtacaaatgtgaacaagtggaagctcagtctgaagccaactgtggaagaactgcgttccatgttgacaccttcgttcaaggaagctttggcgagtatggacttggaggagctgtttacgacgtacgggacacattatctgagtgaggtgttggtgggaggtcgcgcagattatgtcgccaccaccaaaaccagtgcattcagctctgagattcaaatcagcgtagttgcggagtgttcattcaagtccgtggctggcatggacgtatcagccaagtacaaggagcttatccagaaattccaagagaacagctccactagtctgtacgccatcggtgggaccacaatctccagcatcacagacaaagacacttacaatgcatggctcagttcgattgatacacgtcccgtcttctgtggattcacttacgaaagtcttcagcccatttgggaactcgctgaatcccctcagcgccaggagatcctgcaaaaggctacgaagacctttattccgcccgaaatcaaacgaaatgcaatcgtcgacgtagatattatcgtgtccgacaactatggggtgaatcctccctacagctatacgaagatcgattatgatctgaaccacaatgccaagggcaaatttatctttttgtgctacaatcaacagaagatatcagtagcaggatcccctgcggatccgaagcccatcactgccttgtacgtggcttctggcgatgacgatcatccatacgttcctccaggctataccaggatcagcagcgatctgaacgagggtgcggggggcaaatttatctatctatgctacacaaaagatccggctgcaatacccagcgacgaggatagactgcccatacgtggcatccgcgttattggtaacgaaaatatcgacaatgtggttacaccttacggattcacgaagattgataaagatctgaacgagggtgcagggggagactttatctacgttcgtttctcacctcatttagac

SEQ ID NO: 50 - protein, 451 aa, Lycopodium nummulariifolium
MARIEPLPGSDAIGHSYDVFGFYANPKSVNTQLFDFAPQQEIILEDHKWLLSTDIEYIAVRETEIKTVSLRTKDAYSTELAASVKVSGSYGSFSASVESDFSQSISDETDSTYTSVRTNVNKWKLSLKPTVEELRSMLTPSFKEALASMDLEELFTTYGTHYLSEVLVGGRADYVATTKTSAFSSEIQISVVAECSFKSVAGMDVSAKYKELIQKFQENSSTSLYAIGGTTISSITDKDTYNAWLSSIDTRPVFCGFTYESLQPIWELAESPQRQEILQKATKTFIPPEIKRNAIVDVDIIVSDNYGVNPPYSYTKIDYDLNHNAKGKFIFLCYNQQKISVAGSPADPKPITALYVASGDDDHPYVPPGYTRISSDLNEGAGGKFIYLCYTKDPAAIPSDEDRLPIRGIRVIGNENIDNVVTPYGFTKIDKDLNEGAGGDFIYVRFSPHLD

SEQ ID NO: 51 - DNA, 1353 bp, Lycopodium nummulariifolium
atggcccgtatcgagccattacctggatcggatgcaatcggacacagttatgatgtattcggattttacgccaaccccaagagcgttaatacacagctcttcgactttgcccctcagcaagaaattattttagaggaccacaaatggctcctctccactgatattgaatatattgctgttcgagatacggaaataaaaaccgtctctcttcgtacaaaagatgcatactccacggagctggctgcgagcgtaaaagtgtccggcagctatggcagcttctcggcttcggtagagtctgatttttcccaaagcatcagcgatgagacggattccacttacacttctattcgtacaaatgtgaacaagtggaagctcagtctgaagccaactgtggaagaactgcgttccatgttgacaccttcgttcaaggaagctttggcgagtatggactcggaggagctgtttacgacgtacgggacacattatctgagtgaggtgttggtgggaggtcgcgcagattatgtcgccaccaccaaaaccagtgcattcagctctgatattcaaatcagcgtagttgcggagtgttcattcaagtccgtggctggcatggacgtatcagccaagtacaaggagcttatccagaaattccaagagaacagctccactagtctgtacgccatcggtgggaccacaatctccagcatcacagacaaagacacttacaatgcatggctcagttcgattgatacacgtcccgtcttctgtggattcacttacgaaagtcttcagcccatttgggaactcgctgaatcccctcagcgccaggagatcctgcaaaaggctacgaagacctttattccgcccgaaatcaaacgaaatgcaatcgtcgacgtagatattatcgtgtccgacaactatggggtgaatcctccctacggctatacgaagatcgattatgatctgaaccgcaatgccaagggcaaatttatctttttgtgctacaatcaacagaagatatcagtagcaggatcccctgcggatccgaagcccatcactgctttgtacgtggcttctggcgatgacgatcatccatacgttcctccaggttacaccaggatcagcagcgatctgaacgagggtgcggggggcaaatttatctatctatgctacacaaaagatccggctgcaatacccagcgacgaggatggactgcccatacgtggcatctgcgttattggtaacgaaaatatcgagaatgtggttacaccttacggattcacgaagattgataaagatctgaacgagggtgcagggggagactttatcttcgttcgtttctcacctcatttagac

SEQ ID NO: 52 - protein, 451 aa, Lycopodium nummulariifolium
MARIEPLPGSDAIGHSYDVFGFYANPKSVNTQLFDFAPQQEIILEDHKWLLSTDIEYIAVRDTEIKTVSLRTKDAYSTELAASVKVSGSYGSFSASVESDFSQSISDETDSTYTSIRTNVNKWKLSLKPTVEELRSMLTPSFKEALASMDSEELFTTYGTHYLSEVLVGGRADYVATTKTSAFSSDIQISVVAECSFKSVAGMDVSAKYKELIQKFQENSSTSLYAIGGTTISSITDKDTYNAWLSSIDTRPVFCGFTYESLQPIWELAESPQRQEILQKATKTFIPPEIKRNAIVDVDIIVSDNYGVNPPYGYTKIDYDLNRNAKGKFIFLCYNQQKISVAGSPADPKPITALYVASGDDDHPYVPPGYTRISSDLNEGAGGKFIYLCYTKDPAAIPSDEDGLPIRGICVIGNENIENVVTPYGFTKIDKDLNEGAGGDFIFVRFSPHLD

SEQ ID NO: 53 - DNA, 1353 bp, Lycopodium nummulariifolium
atggcccgtatcgagccattacctggatcggatgcaatcggacacagttatgatgtattcggattttacgccaaccccaagagcgttaatacacagctcttcgactttgcccctcagcaagaaattattttagaggaccacaaatggctcctctccactgatattgaatatattgctgtccgagaaaccgaaataaaaaccgtctctcttcgtacaaaagatgcatactccacggagctggctgcaagcgtaaaagtgtccggcagctatggcagcttctcggcttcggtagagtctgatttctcccaaagcatcagcgatgagacggattccacttacacttctgttcgtacaaatgtgaacaagtggaagctcagtctgaagccaactgtggaagaactgcgttccatgttgacaccttctttcaaggaagctttggcgagtatggactcggaggagctgtttacgacgtacgggacacattatctgagtgaggtgttggtgggaggtcgcgcagattatgtcgccaccaccaaaaccagtgcattcagctctgagattcaaatcagcgtagttgcggagtgttcattcaagtccgtggctggcatggacgtatcagccaagtacaaggagcttatccagaaattccaagagaacagctccactagtctgtacgccatcggtgggaccacaatctccagcatcacagacaaagacacttacaatgcatggctcagttcgattgatacacgtcccgtcttctgtggattcacttacgaaagtcttcagcccatttgggaactcgctgaatcccctcagcgccaggagatcctgcaaaaggctacgaagacctttattccgcccgaaatcaaacgaaatgcaatcgtcgacgtagatattatcgtgtccgacaactatggggtgaatcctccctacagctatacgaagatcgattatgatctgaaccgcaatgccaagggcaaatatatctttttgtgctacaatcaacagaagatatcagtagcaggatcccctgcggatccgaagcccatcactgccttgtacgtggcttctggcgatgacaataatccatacattcctccaggttataccaggatcaacagcgatctgaacgagggtgcggggggcaaatttatttatctatgctacacaaaagatccggctgcaatacccagcgacgaggatggactgcccatacgtggcatccgcgttattggtaacgaaaatggcgagaatgtggttacaccttacggattcacgaagattgataaagatctgaacgagggtgcagggggagattatatcttcgttcgtttctcacctcatttagac

SEQ ID NO: 54 - protein, 451 aa, Lycopodium nummulariifolium
MARIEPLPGSDAIGHSYDVFGFYANPKSVNTQLFDFAPQQEIILEDHKWLLSTDIEYIAVRETEIKTVSLRTKDAYSTELAASVKVSGSYGSFSASVESDFSQSISDETDSTYTSVRTNVNKWKLSLKPTVEELRSMLTPSFKEALASMDSEELFTTYGTHYLSEVLVGGRADYVATTKTSAFSSEIQISVVAECSFKSVAGMDVSAKYKELIQKFQENSSTSLYAIGGTTISSITDKDTYNAWLSSIDTRPVFCGFTYESLQPIWELAESPQRQEILQKATKTFIPPEIKRNAIVDVDIIVSDNYGVNPPYSYTKIDYDLNRNAKGKYIFLCYNQQKISVAGSPADPKPITALYVASGDDNNPYIPPGYTRINSDLNEGAGGKFIYLCYTKDPAAIPSDEDGLPIRGIRVIGNENGENVVTPYGFTKIDKDLNEGAGGDYIFVRFSPHLD

SEQ ID NO: 55 - DNA, 1434 bp, Ophioglossum pendulum
atggaacccaacaaaggtggtgctccagccatgaaaaatgtagccaaaccttccacaaagagactcataccgtcatccattgctgcatcatcgcaaacatctgcaaatgcattaaccgagccattgcctggctctgatgccatcggccagagctacgatgcattcgggttcttcgccaatcccagaagcatcatgaaggagttgttcgagttcagtcctcaagaggagatagtcgtggaaggaaatacctggcttctctcttcggacttcgtttacaccgcaattagagacactgagacctccacggtctcacgtcgcaccaaggacgactactccaaggaattggctgtgaaggtgaagctgtctggaagctatggctatttttctgcctccgttgagtctgatttctctcagagcatttccgatgcgacggacaccacatacacttcagttcgcacccacgtcaacaagtggaggctgagcctgaaggacgatgttggggcccttcgctcgaagctgctgcctggcgtcaagcaggcgctggctaccatggatgctacgcagctctttgacacgttcgggactcactatgtgagcgaggtgcttgtgggtgggcgtgcagactacgttgccaccaccaagaccagcgcgttcagctcatccaccagcatcagcgtagcggcagaagcatcattccagtccatcgcgggtggggaggtgtctccggagtccaaggtgcttgcggagatgctgagagagaacagcagcacacgcctgtacgctcttggcgggagtgccctccccaacatcacagatccagccacgtacaacgcctggctggagtccattgacaccatccctgtcttctgcggattcactcaaaacagcctcaagtccatctcggagcttgctgactccgctcaacgccgggacgctctggccaaagcctcccaaagctatatcccatcatacgtgactcgtcctgcagtggttggcttggaggtcataatatcggacagcaactcggagagccctccctatggctacaccagaatagactacgacctcaaccgcaacgcaggaggcaaatacgtgttcctctgctacaagcagaagaacatttcagtgggaggggatgccgatgccatcaccgacgtccttgtcgtctacggaaatgaccgaaatccatctgtgccgtctggctacaccaagatcgacaaggacctcaactccggggcaggcggtaagtatatctacttctgctactccaaggacaagcggaagcaagaggagggactgcccattcgtgggcttcgtgttgttgggcctcacccaacctcagtggcaccttacggattctctaagatcgacatagatctgaatatgggtgcaggaggagattttatatacctttgcaaatcacgccatttggag

SEQ ID NO: 56 - protein, 478 aa, Ophioglossum pendulum
MEPNKGGAPAMKNVAKPSTKRLIPSSIAASSQTSANALTEPLPGSDAIGQSYDAFGFFANPRSIMKELFEFSPQEEIVVEGNTWLLSSDFVYTAIRDTETSTVSRRTKDDYSKELAVKVKLSGSYGYFSASVESDFSQSISDATDTTYTSVRTHVNKWRLSLKDDVGALRSKLLPGVKQALATMDATQLFDTFGTHYVSEVLVGGRADYVATTKTSAFSSSTSISVAAEASFQSIAGGEVSPESKVLAEMLRENSSTRLYALGGSALPNITDPATYNAWLESIDTIPVFCGFTQNSLKSISELADSAQRRDALAKASQSYIPSYVTRPAVVGLEVIISDSNSESPPYGYTRIDYDLNRNAGGKYVFLCYKQKNISVGGDADAITDVLVVYGNDRNPSVPSGYTKIDKDLNSGAGGKYIYFCYSKDKRKQEEGLPIRGLRVVGPHPTSVAPYGFSKIDIDLNMGAGGDFIYLCKSRHLE

SEQ ID NO: 57 - DNA, 1434 bp, Platycerium bifurcatum
atggaacccaacaaaggtggtgctccagccatgaaaaatgtagccaaaccttccacaaagagactcataccgtcatccattgctgcatcatcgcaaacatctgcaaatgcattaaccgagccattgcctggctctgatgccatcggccagagctacgatgcattcgggttcttcgccaatcccagaagcatcatgaaggagttgttcgagttcagtcctcaagaggagatagtcgtggaaggaaatacctggcttctctcttcggacttcgtttacaccgcaattagagacactgagacctccacggtctcacgtcgcaccaaggacgactactccaaggaattggctgtgaaggtgaagctgtctggaagctatggctatttttctgcctccgttgagtctgatttctctcagagcatttccgatgcgacggacaccacatacacttcagttcgcacccacgtcaacaagtggaggctgagcctgaaggacgatgttggggcccttcgctcgaagctgctgcctggcgtcaagcaggcgctggctaccatggatgctacgcagctctttgacacgttcgggactcactatgtgagcgaggtgcttgtgggtgggcgtgcagactacgttgccaccaccaagaccagcgcgttcagctcatccaccagcatcagcgtagcggcagaagcatcattccagtccatcgcgggtggggaggtgtctccggagtccaaggtgcttgcggagatgctgagagagaacagcagcacacgcctgtacgctcttggcgggagtgccctccccaacatcacagatccagccacgtacaacgcctggctggagtccattgacaccatccctgtcttctgcggattcactcaaaacagcctcaagcccatctcggagcttgctgactccgctcaacgccgggacgctctggccaaagcctcccaaagctatatcccatcatacgtgactcgtcctgcagtggttggcttggaggtcataatatcggacagcaactcggagagccctccctatggctacaccagaatagactacgacctcaaccgcaacgcaggaggcaaatacgtgttcctctgctacaagcagaagaacatttcagtgggaggggatgccgatgccatcaccgacgtccttgtcgtctacggaaatgaccgaaatccatctgtgccgtctggctacaccaagatcgacaaggacctcaactccggggcaggcggtaagtatatctacttctgctactccaaggacaagcggaagcaagaggagggactgcccattcgtgggcttcgtgttgttgggcctcacccaacctcagtggcaccttacggattctctaagatcgacatagatctgaatatgggtgcaggaggagattttatatacctttgcaaatcacgccatttggag

SEQ ID NO: 58 - protein, 478 aa, Platycerium bifurcatum
MEPNKGGAPAMKNVAKPSTKRLIPSSIAASSQTSANALTEPLPGSDAIGQSYDAFGFFANPRSIMKELFEFSPQEEIVVEGNTWLLSSDFVYTAIRDTETSTVSRRTKDDYSKELAVKVKLSGSYGYFSASVESDFSQSISDATDTTYTSVRTHVNKWRLSLKDDVGALRSKLLPGVKQALATMDATQLFDTFGTHYVSEVLVGGRADYVATTKTSAFSSSTSISVAAEASFQSIAGGEVSPESKVLAEMLRENSSTRLYALGGSALPNITDPATYNAWLESIDTIPVFCGFTQNSLKPISELADSAQRRDALAKASQSYIPSYVTRPAVVGLEVIISDSNSESPPYGYTRIDYDLNRNAGGKYVFLCYKQKNISVGGDADAITDVLVVYGNDRNPSVPSGYTKIDKDLNSGAGGKYIYFCYSKDKRKQEEGLPIRGLRVVGPHPTSVAPYGFSKIDIDLNMGAGGDFIYLCKSRHLE

SEQ ID NO: 59 - DNA, 1410 bp, Ophioglossum pendulum
  misc_feature (924)..(924): n is a, c, g, or t
atgctcccggccgccatggcggccgcgggaattcgatttgaattaggcatgcgaggatccgaacccaacaaaggtggtgctccagccatgaaaaatgtagccaaaccttccacaaagagactcataccgtcatccattgctgcatcatcgcaaacatctgcaaatgcattaaccgagccattgcctggctctgatgccatcggccagagctacgatgcattcgggttcttcgccaatcccagaagcatcatgaaggagttgttcgagttcagtcctcaagaggagatagtcgtggaaggaaatacctggcttctctcttcggaattcgtttacaccgcaattagagacactgagacctccacggtctcacgtcgcaccaaggacgactactccaaggaattggctgtgaaggtgaagctgtctggaagctatggctatttttctgcctccgttgagtctgatttctctcagagcatttccgatgtgacggacaccacatacacttcagttcgcacccacgtcaacaagtggaggctgagcctgaaggacgatgttggggcccttcgctcgaagctgctgcctggcgtcaagcaggcgctggctaccatggatgctacgcagctctttgacacgttcgggactcactatgtgagcgaggtgcttgtgggtgggcgtgcagactacgttgccaccaccaagaccagcgcgttcagctcatccaccagcatcagcgtagcggcagaagcatcattccagtccatcgcgggtggggaggtgtctccggagtccaaggtgcttgcggagacgctgagagagaacagcagcacacgcctgtacgctcttggcgggagtgccctccccaacatcacagatccagccacgtacaacgcctggctggagtccattgacaccatccctgtcttntgcggattcactcaaaacagcctcaagcccatctcggagcttgctgactccgctcaacgccgggacgctctggccaaagcctcccaaagctatatcccatcatacgtgactcgtcctgcagtggttggcttggaggtcataatatcggacagcaactcggagagccctccctatggctacaccagaatagactacgacctcaaccgcaacgcaggaggcaaatacgtgttcctctgctacaagcagaagaacatttcagtgggaggggatgccgatgccatcaccgacgtccttgtcgtctacggaaatgaccgaaatccatctgtgccgtctggctacaccaagatcgacaaggacctcaactccggggcaggcggtaagtatatctacttctgctactccaaggacaagcggaagcaagaggagggactgcccattcgtgggcttcgtgttgttgggcctcacccaacctcagtggcaccttac

SEQ ID NO: 60 - protein, 451 aa, Ophioglossum pendulum
  misc_feature (289)..(289): Xaa can be any naturally occurring amino acid
MEPNKGGAPAMKNVAKPSTKRLIPSSIAASSQTSANALTEPLPGSDAIGQSYDAFGFFANPRSIMKELFEFSPQEEIVVEGNTWLLSSEFVYTAIRDTETSTVSRRTKDDYSKELAVKVKLSGSYGYFSASVESDFSQSISDVTDTTYTSVRTHVNKWRLSLKDDVGALRSKLLPGVKQALATMDATQLFDTFGTHYVSEVLVGGRADYVATTKTSAFSSSTSISVAAEASFQSIAGGEVSPESKVLAETLRENSSTRLYALGGSALPNITDPATYNAWLESIDTIPVXCGFTQNSLKPISELADSAQRRDALAKASQSYIPSYVTRPAVVGLEVIISDSNSESPPYGYTRIDYDLNRNAGGKYVFLCYKQKNISVGGDADAITDVLVVYGNDRNPSVPSGYTKIDKDLNSGAGGKYIYFCYSKDKRKQEEGLPIRGLRVVGPHPTSVAPY

SEQ ID NO: 61 - DNA, 1491 bp, Ophioglossum pendulum
atggtcgacctgcaggcggccgcgaattcactagtgattgaattaggcatgagaggatccgaacccaacaaaggtggtgctccagccatgaaaaatgtagccaaaccttccacaaagagactcataccgtcatccattgctgcatcatcgcaaacatctgcaaatgcattaaccgagccattgcctggctctgatgccatcggccagagctacgatgcattcgggttcttcgccaatcccagaagcatcatgaaggagttgttcgagttcagtcctcaagaggagatagtcatggaaggaaatacctggcttctctcttcggacttcgtttacaccgcaattagagacactgagacctccacggtctcacgtcgcaccaaggacgactactccaaggaattggctgtgaaggtgaagctgtctggaagctatggctatttttctgcctccgttgagtctgatttctctcagagcatttccgatgcgacggacaccacatacacttcagttcgcacccacgtcaacaagtggaggctgagcctgaaggacgatgttggggcccttcgctcgaagctgctgcctggcgtcaagcaggcgctggctaccatggatgctacgcagctctttgacacgttcgggactcactatgtgagcgaggtgcttgtgggtgggcgtgcagactacgttgccaccaccaagaccagcgcgttcagctcatccaccagcatcagcgtagcggcagaagcatcattccagtccatcgcgggtggggaggtgtctccggagtccaaggtgcttgcggagatgctgagagagaacagcagcacacgcctgtacgctcttggcgggagtgccctccccaacatcacagatccagccacgtacaacgcctggctggagtccattgacaccatccctgtcttctgcggattcactcaaaacagcctcaagcccatctcggagcttgctgactccgctcaacgccgggacgctctggccaaagcctcccaaagctatatcccatcatacgtgactcgtcctgcagtggttggcttggaggtcataatatcggacagcaactcggagagccctccctatggctacaccagaatagactacgacctcaaccgcaacgcaggaggcaaatacgtgttcctctgctacaagcagaagaacatttcagtgggaggggatgccgatgccatcaccgacgtccttgtcgtctacggaaatgaccgaaatccatctgtgccgtctggctacaccaagatcgacaaggacctcaactccggggcaggcggtaagtatatctacttctgctactccaaggacaagcggaagcaagaggagggactgcccattcgtgggcttcgtgttgttgggcctcacccaacctcagtggcaccttacggattctctaagatcgacatagatctgaatatgggtgcaggaggagattttatatacctttgcaaatcacgccatttggag

SEQ ID NO: 62 - protein, 478 aa, Ophioglossum pendulum
MEPNKGGAPAMKNVAKPSTKRLIPSSIAASSQTSANALTEPLPGSDAIGQSYDAFGFFANPRSIMKELFEFSPQEEIVMEGNTWLLSSDFVYTAIRDTETSTVSRRTKDDYSKELAVKVKLSGSYGYFSASVESDFSQSISDATDTTYTSVRTHVNKWRLSLKDDVGALRSKLLPGVKQALATMDATQLFDTFGTHYVSEVLVGGRADYVATTKTSAFSSSTSISVAAEASFQSIAGGEVSPESKVLAEMLRENSSTRLYALGGSALPNITDPATYNAWLESIDTIPVFCGFTQNSLKPISELADSAQRRDALAKASQSYIPSYVTRPAVVGLEVIISDSNSESPPYGYTRIDYDLNRNAGGKYVFLCYKQKNISVGGDADAITDVLVVYGNDRNPSVPSGYTKIDKDLNSGAGGKYIYFCYSKDKRKQEEGLPIRGLRVVGPHPTSVAPYGFSKIDIDLNMGAGGDFIYLCKSRHLE

SEQ ID NO: 63 - DNA, 1443 bp, Ophioglossum pendulum
  misc_feature (833)..(833): n is a, c, g, or t
  misc_feature (873)..(873): n is a, c, g, or t
  misc_feature (876)..(876): n is a, c, g, or t
atgcgaggatccgaacccaacaaaggtggtgctccagccatgaaaaatgtagccaaaccttccacaaagacactcataccgtcatccattgctgcatcatcgcaaacagctgcaaatgcattaaccgagccattgcctggctctgatgccatcggccagagctacaatgcattcgggttctttgccaatcccagaagcatcatgaaggagttgtttgagttcagtcctcaagaggagatagtcgtggaaggaaatacctggcttctctcttcggacttcgtttacaccgcaattagagacagtgaggccttcacgctctcacatcgcaccaaggacgactactccaaggaattggctctgaaggtgaagctgtctggaagctatggctttttttctgcctccgttgagtctgatttctctcagagcatttccgatgtgacggacaccacatacacttcagttcgcacccacgtcaacaagtggaggctgagcctgaaggacgatgttggggcccttcgctcgaagctgctgcctggcttcaagcaggcgctggctaccatggatgctacgcagctctttgacacgttcgggactcactatgtgagcgaggtgcttgtgggtgggcgtgcagactacgttgccaccaccaagaccagcgcgttcagctcgtccaccagcatcagcgtagcggcagaagcatcattcaagtccatcgcgggtggggaggtgtctccggagtccaaggagcttgcggagacgctgagagagaacagcagcacacgactgtacgctcttggcgggagtgccctcaccaacatcacagatccagccangtacaacgcctggctgcagtccattgacaccatccctgtnttntgcggattcactcaaaacagcctcaagcccatctcggagcttgctgactccgctcaacgccgggacgctctggccaaagcctcccaaagctatatcccatcatacgtgactcgtcctgcagtggttggcttggaggtcataatatcggacagcaactcagagagccctccctatggctacaccagaatagactacgacctcaaccgcaacgcaggaggcaaatacgtgttcctctgctacaagcagaagtacatttcagtgggaggggatgccgatgccatcaccgacgtccttgtcgtctacggaaatgaccgaaatccatctgtgccgtctggctacaccaagatcgacaaggacctcaactccggggcaggaggtaagtatatctacttctgctactccaaggacaagcacaagcaagaggagggactgcccattcgtgggcttcgtgttgttgggcctcacccaacctcagtggcaccttacggattctctaagatcgacatagatctgaatatgggtgcaggaggagattttatatacctttgcaaatcacgccatttggag

SEQ ID NO: 64 - protein, 478 aa, Ophioglossum pendulum
  misc_feature (275)..(275): Xaa can be any naturally occurring amino acid
  misc_feature (289)..(289): Xaa can be any naturally occurring amino acid
MEPNKGGAPAMKNVAKPSTKTLIPSSIAASSQTAANALTEPLPGSDAIGQSYNAFGFFANPRSIMKELFEFSPQEEIVVEGNTWLLSSDFVYTAIRDSEAFTLSHRTKDDYSKELALKVKLSGSYGFFSASVESDFSQSISDVTDTTYTSVRTHVNKWRLSLKDDVGALRSKLLPGFKQALATMDATQLFDTFGTHYVSEVLVGGRADYVATTKTSAFSSSTSISVAAEASFKSIAGGEVSPESKELAETLRENSSTRLYALGGSALTNITDPAXYNAWLQSIDTIPVXCGFTQNSLKPISELADSAQRRDALAKASQSYIPSYVTRPAVVGLEVIISDSNSESPPYGYTRIDYDLNRNAGGKYVFLCYKQKYISVGGDADAITDVLVVYGNDRNPSVPSGYTKIDKDLNSGAGGKYIYFCYSKDKHKQEEGLPIRGLRVVGPHPTSVAPYGFSKIDIDLNMGAGGDFIYLCKSRHLE

SEQ ID NO: 65 - DNA, 1443 bp, Ophioglossum pendulum
atgcgaggatccgaacccaacaaaggtggtgctccagccatgaaaaatgtagccaaaccttccacaaagagactcataccgtcatccattgctgcatcatcgcaaacatctgcaaatgcattaaccgagccattgcctggctctgatgccatcggccagagctacgatgcattcgggttcttcgccaatcccagaagcatcatgaaggagttgttcgagttcagtcctcaagaggagataatcgtggaaggaaatacctggcttctctcttcggacttcgtttacaccgcaattagagacactgagacctccacggtctcacgtcgcaccaaggacgactactccaaggaattggctgtgaaggtgaagctgtctggaagctatggctatttttctgcctccgttgagtctgatttctctcagagcatttccgatgcgacggacaccacatacacttcagttcgcacccacgtcaacaagtggaggctgagcctgaaggacgatgttggggcccttcgctcgaagctgctgcctggcgtcaagcaggcgctggctaccatggatgctacgcagctctttgacacgttcgggactcactgtgtgagcgaggtgcttgtgggtgggcgtgcagactacgttgccaccaccaagaccagcgcgttcagctcatccaccagcatcagcgtagcggcagaagcatcattccagtccatcgcgggtggggaggtgtctccggagtccaaggtgcttgcggagatgctgagagagaacagcagcacacgcctgtacgctcttggcgggagtgccctccccaacatcacagatccagccacgtacaacgcctggctggagtccattgacaccatccctgtcttctgcggattcactcaaaacagcctcaagcccatctcggagcttgctgactccgctcaacgccgggacgctctggccaaagcctcccaaagctatatcccatcatacgtgactcgtcctgcagtggttggcttggaggtcataatatcggacagcaactcggagagccctccctatggctacaccagaatagactacgacctcaaccgcaacgcaggaggcaaatacgtgttcctctgctacaagcagaagaacatttcagtgggaggggatgccgatgccatcaccgacgtccttgtcgtctacggaaatgaccgaaatccatctgtgccgtctggctacaccaagatcgacaaggacctcaactccggggcaggcggtaagtatatctacttctgctactccaaggacaagcggaagcaagaggagggactgcccattcgtgggcttcgtgttgttgggcctcacccaacctcagtggcaccttacggattctctaagatcgacatagatctgaatatgggtgcaggaggagattttatatacctttgcaaatcacgccatttggag

SEQ ID NO: 66 - protein, 478 aa, Ophioglossum pendulum
MEPNKGGAPAMKNVAKPSTKRLIPSSIAASSQTSANALTEPLPGSDAIGQSYDAFGFFANPRSIMKELFEFSPQEEIIVEGNTWLLSSDFVYTAIRDTETSTVSRRTKDDYSKELAVKVKLSGSYGYFSASVESDFSQSISDATDTTYTSVRTHVNKWRLSLKDDVGALRSKLLPGVKQALATMDATQLFDTFGTHCVSEVLVGGRADYVATTKTSAFSSSTSISVAAEASFQSIAGGEVSPESKVLAEMLRENSSTRLYALGGSALPNITDPATYNAWLESIDTIPVFCGFTQNSLKPISELADSAQRRDALAKASQSYIPSYVTRPAVVGLEVIISDSNSESPPYGYTRIDYDLNRNAGGKYVFLCYKQKNISVGGDADAITDVLVVYGNDRNPSVPSGYTKIDKDLNSGAGGKYIYFCYSKDKRKQEEGLPIRGLRVVGPHPTSVAPYGFSKIDIDLNMGAGGDFIYLCKSRHLE

SEQ ID NO: 67 - DNA, 1491 bp, Ophioglossum pendulum
atggtcgacctgcaggcggccgcgaattcactagtgattgaattaggcatgcgaggatccgaacccaacaaaggtggtgctccagccatgaaaaatgtagccaaaccttccacaaagagactcataccgtcatccattgctgcatcatcgcaaacatctgcaaatgcattaaccgagccattgcctggctctgatgccatcggccagagctacgatgcgttcgggttcttcgccaatcccagaagcatcatgaaggagttgtttgagttcagtcctcaagaggagatagtcgtggaaggaaatacctggcttctctcttcggacttcgtttacaccgcaattagagacagtgaggccttcacgctctcacatcgcaccaaggacgactactccaaggaattggctctgaaggtgaagctgtctggaagctatggctttttttctgcctccgttgagtctgatttctctcagagcatttccgatgtgacggacaccacatacacttcagttcgcacccacgtcaacaagtggaggctgagcctgaaggacgatgttggggcccttcgctcgaagctgctgcctggcttcaagcaggcgctggctaccatggatgctacgcagctctttgacacgttcgggactcactatgtgagcgaggtgcttgtgggtgggcgtgcagactacgttgccaccaccaagaccagcgcgttcagctcgtccaccagcatcagcgtagcggcagaagcatcattcaagtccatcgcgggtggggaggtgtctccggagtccaaggagcttgcggagacgctgagagagaacagcagcacacgactgtacgctcttggcgggagtgccctcaccaacatcacagatccagccacgtacaacgcctggctgcagtccattgacaccatccctgtcttctgcggattcactcaaaacagcctcaagcccatctcggagcttgctgactccgctcaacgccgggacgctctggccaaagcctcccaaagctatatcccatcatacgtgactcgtcctgcagtggttggcttggaggtcataatatcggacagcaactcggagagccctccctatggctacaccagaatagactacgacctcaaccgcaacgcaggaggcaaatacgtgttcctctgctacaagcagaagaacatttcagtgggaggggatgcggatgccatcaccgacgtccttgtcgtctacggaaatgaccgaaatccatctgtgccgtctggctacaccaagatcgacaaggacctcaactccggggcaggcggtaagtatatctacttctgctactccaaggacaagcggaagcaagaggagggactgcctattcgtgggcttcgtgttgttgggcctcacccaacctcagtggcaccttacggattctctaagatcgacatagatctgaatatgggtgcaggaggagattttatatacctttgcaaatcacgccatttggag

SEQ ID NO: 68 - protein, 478 aa, Ophioglossum pendulum
MEPNKGGAPAMKNVAKPSTKRLIPSSIAASSQTSANALTEPLPGSDAIGQSYDAFGFFANPRSIMKELFEFSPQEEIVVEGNTWLLSSDFVYTAIRDSEAFTLSHRTKDDYSKELALKVKLSGSYGFFSASVESDFSQSISDVTDTTYTSVRTHVNKWRLSLKDDVGALRSKLLPGFKQALATMDATQLFDTFGTHYVSEVLVGGRADYVATTKTSAFSSSTSISVAAEASFKSIAGGEVSPESKELAETLRENSSTRLYALGGSALTNITDPATYNAWLQSIDTIPVFCGFTQNSLKPISELADSAQRRDALAKASQSYIPSYVTRPAVVGLEVIISDSNSESPPYGYTRIDYDLNRNAGGKYVFLCYKQKNISVGGDADAITDVLVVYGNDRNPSVPSGYTKIDKDLNSGAGGKYIYFCYSKDKRKQEEGLPIRGLRVVGPHPTSVAPYGFSKIDIDLNMGAGGDFIYLCKSRHLE

SEQ ID NO: 69 - DNA, 1443 bp, Ophioglossum pendulum
atgcgaggatccgaacccaacaaaggtggtgctccagccatgaaaaatgtagccaaaccttccacaaagagactcataccgtcatccattgctgcatcatcgcaaacatctgcaaatgcattaaccgagccattgcctggctctgatgccatcggccagagctacgatgcattcgggttcttcgccaatcccagaagcatcatgaaggagttgttcgagttcagtcctcaaaaggagatagtcgtggaaggaaatacctggcttctctcttcggacttcgtttacaccgcaattagagacactgagacctccacggtctcacgtcgcaccaaggacgactactccaaggaattggctgtgaaggtgaagctgtctggaagctatggctatttttctgcctccgttgagtctgatttctctcagagcatttccgatgcgacggacaccacatacacttcagttcgcacccacgtcaacaagtggaggctgagcctgaaggacgatgttggggcccttcgctcgaagctgctgcctggcgtcaagcaggcgctggctaccatggatgctacgcagctctttgacacgttcgggactcactatgtgagcgaggtgcttgtgggtgggcgtgcagactacgttgccaccaccaagaccagcgcgttcagctcatccaccagcatcagcgtagcggcagaagcatcattccagtccatcgcgggtggggaggtgtctccggagtccaaggtgcttgcggagatgctgagagagaacagcagcacacgcctgtacgctcttggcgggagtgccctccccaacatcacagatccagtcacgtacaacgcctggctggagtccattgacaccatccctgtcttctgcggattcactcaaaacagcctcaagcccatctcggagcttgctgactccgctcaacgccgggacgctctggccaaagcctcccaaagctatatcccatcatacgtgactcgtcctgcagtggttggcttggaggtcataatatcggacagcaactcggagagccctccctatggctacaccagaatagactacgacctcaaccgcaacgcaggaggcaaatacgtgttcctctgctacaagcagaagaacatttcagtgggaggggatgccgatgccatcaccgacgtccttgtcgtctacggaaatgaccgaaatccatctgtgccgtctggctacaccaagatcgacaaggacctcaactccggggcaggcggtaagtatatctacttctgctactccaaggacaagcggaagcaagaggagggactgcccattcgtgggcttcgtgttgttgggcctcacccaacctcagtggcaccttacggattctctaagatcgacatagatctgaatatgggtgcaggaggagattttatatacctttgcaaatcacgccatttggag

SEQ ID NO: 70 - protein, 478 aa, Ophioglossum pendulum
MEPNKGGAPAMKNVAKPSTKRLIPSSIAASSQTSANALTEPLPGSDAIGQSYDAFGFFANPRSIMKELFEFSPQKEIVVEGNTWLLSSDFVYTAIRDTETSTVSRRTKDDYSKELAVKVKLSGSYGYFSASVESDFSQSISDATDTTYTSVRTHVNKWRLSLKDDVGALRSKLLPGVKQALATMDATQLFDTFGTHYVSEVLVGGRADYVATTKTSAFSSSTSISVAAEASFQSIAGGEVSPESKVLAEMLRENSSTRLYALGGSALPNITDPVTYNAWLESIDTIPVFCGFTQNSLKPISELADSAQRRDALAKASQSYIPSYVTRPAVVGLEVIISDSNSESPPYGYTRIDYDLNRNAGGKYVFLCYKQKNISVGGDADAITDVLVVYGNDRNPSVPSGYTKIDKDLNSGAGGKYIYFCYSKDKRKQEEGLPIRGLRVVGPHPTSVAPYGFSKIDIDLNMGAGGDFIYLCKSRHLE

SEQ ID NO: 71 - DNA, 1353 bp, Huperzia goebelii
atggcccaaatagagccattacctggatcggatgcaatcggacacagttatgatgtattcggattttacgccaaccccaagagcgttaatagacagctcttcgactttgcccctcagcaagaaattactttagaggaccacacatggctcctctccactgatattgtatatattgctgtccgggatacggatataaaaaccgtctctcttcgcacaaaagattcatactccacggagctggctgcaagcgtaaaagtgtccggcagctatggcagcttctcggcttcggtagagtctgatttctcccaaagcatcagcgatgagacggattccacttacacttcagttcgtacaaatgtgaacaagtggaagctcagtctgaagccaactgtggaagaactgcgttccatgttgacaccttcgttcaaggaagctttggcgagtatgaactcggaggagctgtttacgacgtacggaacacattatctgagtgaggtgttggtgggaggtcgcgcagattatgtcgccaccaccaaaaccagtgcattcagctctgatattcaaatcagcgtagttgcggagagttcattcaagtccgtggctggcatggacgtatcatccaagtacaaggaacttatccagatattccaagagaacagctccactagtctgtacgccattggtgggaccgcactctccagcatcacagacacggacacttacaatgcatggctcagttcgattgatacacttcccgtcttctgtggattcacttacgaaagtcttcagcccatctgggaactcgctgaatcccctcagcgccaggagatcctccagaaggctacgaagacctttattccgcccgaaatcagacgaaatgcgatcgtcgacgtagatattatcgtgtccgacaactattgggtgaatcctccctacggctatacgaagatcgattatgatctgaaccgcaatgccaagggcaaatatatctttttgtgctacaatcaacagaagatatcagtagcaggatcccctgcggatccgaagcccatcactgccttgtacgtggcttctggcgatgacgatcatccatacattcctccaggttataccaggatcaacagcgatctgaacgagggtgcggggggcaaatatatctatctatgctacacaaaagatccggctgcaatacccagcgacgaggatggactgcccatacgtggcatccgcgttattggtaacgaaaaagtcgagaatgtggttacaccttacggattcacgaagattgataaagatctgaacgagggtgcagggggagactatatcttcgtttgtttctcacgtcatttagac

SEQ ID NO: 72 - protein, 451 aa, Huperzia goebelii
MAQIEPLPGSDAIGHSYDVFGFYANPKSVNRQLFDFAPQQEITLEDHTWLLSTDIVYIAVRDTDIKTVSLRTKDSYSTELAASVKVSGSYGSFSASVESDFSQSISDETDSTYTSVRTNVNKWKLSLKPTVEELRSMLTPSFKEALASMNSEELFTTYGTHYLSEVLVGGRADYVATTKTSAFSSDIQISVVAESSFKSVAGMDVSSKYKELIQIFQENSSTSLYAIGGTALSSITDTDTYNAWLSSIDTLPVFCGFTYESLQPIWELAESPQRQEILQKATKTFIPPEIRRNAIVDVDIIVSDNYWVNPPYGYTKIDYDLNRNAKGKYIFLCYNQQKISVAGSPADPKPITALYVASGDDDHPYIPPGYTRINSDLNEGAGGKYIYLCYTKDPAAIPSDEDGLPIRGIRVIGNEKVENVVTPYGFTKIDKDLNEGAGGDYIFVCFSRHLD

SEQ ID NO: 73 - DNA, 1353 bp, Huperzia goebelii
atggcccaaatagagccattacctggatcggatgcaatcggacacagttatgatgtattcggattttacgccaaccccaagagcgttaatagacagctcttcgactttgcccctcagcaagaaattactttagaggaccacacatggctcctctccactgatattgtatatattgctgtccgggatacggatataacaaccgtctctcttcgcacaaaagattcatactccacggagctggctgcaagcgtaaaagtgtccggcagctatggcagcttctcggcttcggtagagtctgatttctcccaaagcatcagcgatgagacggattccacttacacttcagttcgtacaaatgtgaacaagtggaagctcagtctgaagccaactgtggaagaactgcgttccatgttgacaccttcgttcaaggaagctttggcgagtatgaactcggaggagctgtttacgacgtacggaacacattatctgagtgaggtgttggtgggaggtcgcgcagattatgtcgccaccaccaaaaccagtgcattcagctctgatattcaaatcagcgtagttgcggagagttcattcaagtccgtggctggcatggacgtatcatccaagtacaaggaacttatccagatattccaagagaacagctccactagtctgtacgccattggtgggaccgcactctccagcatcacagacacggacacttacaatgcatggctcagttcgattgatacacttcccgtcttctgtggattcacttacgaaagtcttcagcccatctgggaactcgctgaatcccctcagcgccaggagatcctccagaaggctacgaagacctttattccgcccgaaatcagacgaaatgcgatcgtcgacgtagatattatcgtgtccgacaactattgggtgaatcctccctacggctatacgaagatcgattatgatctgaaccgcaatgccaagggcaaatatatctttttgtgctacaatcaacagaagatatcagtagcaggatcccctgcggatccgaagcccatcactgccttgtacgtggcttctggcgatgacgatcatccatacattcctccaggttataccaggatcaacagcgatctgaacgagggtgcggggggcaaatatatctatctatgctacacaaaagatccggctgcaatacccagcgacgaggatggactgcccatacgtggcatccgcgttattggtaacgaaaaagtcgagaatgtggttacaccttacggattcacgaagattgataaagatctgaacgagggtgcagggggagactatatcttcgtttgtttctcacgtcatttagac

SEQ ID NO: 74 - protein, 451 aa, Huperzia goebelii
MAQIEPLPGSDAIGHSYDVFGFYANPKSVNRQLFDFAPQQEITLEDHTWLLSTDIVYIAVRDTDITTVSLRTKDSYSTELAASVKVSGSYGSFSASVESDFSQSISDETDSTYTSVRTNVNKWKLSLKPTVEELRSMLTPSFKEALASMNSEELFTTYGTHYLSEVLVGGRADYVATTKTSAFSSDIQISVVAESSFKSVAGMDVSSKYKELIQIFQENSSTSLYAIGGTALSSITDTDTYNAWLSSIDTLPVFCGFTYESLQPIWELAESPQRQEILQKATKTFIPPEIRRNAIVDVDIIVSDNYWVNPPYGYTKIDYDLNRNAKGKYIFLCYNQQKISVAGSPADPKPITALYVASGDDDHPYIPPGYTRINSDLNEGAGGKYIYLCYTKDPAAIPSDEDGLPIRGIRVIGNEKVENVVTPYGFTKIDKDLNEGAGGDYIFVCFSRHLD

SEQ ID NO: 75 - DNA, 1353 bp, Huperzia carinata
atggcccaaatcgagccattacctggatcggatgcaatcggacacagttatgatgtattcggattctatgccaaccccaagagcgtgaaaagagagctcttcgactttgcccctcagcaagaaattactgaagagggccacacttggctcctttccactgatattgtaaatactgctgtccgagatacggaaataaaaaccgtctctcttcgcacaaaagatgaatactccacggagctggctgcaagcgtaaaagtgtccggcagctatggcggcttctcggcttcggtagagtctgatttctcccaaagcatcagccaggagacggactccacttacacttcagttcgtacaaatgtgaccaaatggaagctcggtctcaagccaactgtcgaagaactgcgttccatgttgacgccttcgttcaaggaggcattggcgagtatggagtcggaggagctgtttacgacgtacgggacatattatctgagtgaggtgttggtgggaggtcgcgcagattacgtggccaccaccaaaaccagtgcattcagctctgatactcaaatcagcgtagttgcggagagttcattcaagtccgtggctggcatggaggtatcctcccagtacaaggagcttatcaagaaatttcaagagaacagctccactcgtctgtacgccatcggtgggaccgcactctccagcatcacagacacggccacttacaacgcatggctcagttccattgatacacgtcccgtcttctgtggattcactcgcgacagtcttaggcccatctgggagctcgctgaatcccctcagcgccgggagattctccgaaaagctacccaaacgtttatcccaccagaaatcacacgaaatgcaatcgttggcgtagatattatcatgtctgacaactattgggtgaatcctccctacggctatacgaagatcgattatgatctgaaccgcaatgccaagggcaaatatatcttcttgtgttacaaacaacagaagatatcagtagctggatccccagcggatcccaagcccatcactgccttgtacgtggcttctggcgatgatgataatccatatgttcccgcaggttacaccatgatcaacacagatctgaaccagggtgcgaagggcaagtttatctatctctgctacacaaaagatccggctgcaatacccagcgacgaggatggactgcccatacgtggcctccgcgttattggtaacccacaagtcgagaatgtggttacaccttacggattcacgaggattaataaagatctgaatgagggtgcaaagggagagtatatctacgtttgtttctcacgtcatttagac

SEQ ID NO: 76 - protein, 451 aa, Huperzia carinata
MAQIEPLPGSDAIGHSYDVFGFYANPKSVKRELFDFAPQQEITEEGHTWLLSTDIVNTAVRDTEIKTVSLRTKDEYSTELAASVKVSGSYGGFSASVESDFSQSISQETDSTYTSVRTNVTKWKLGLKPTVEELRSMLTPSFKEALASMESEELFTTYGTYYLSEVLVGGRADYVATTKTSAFSSDTQISVVAESSFKSVAGMEVSSQYKELIKKFQENSSTRLYAIGGTALSSITDTATYNAWLSSIDTRPVFCGFTRDSLRPIWELAESPQRREILRKATQTFIPPEITRNAIVGVDIIMSDNYWVNPPYGYTKIDYDLNRNAKGKYIFLCYKQQKISVAGSPADPKPITALYVASGDDDNPYVPAGYTMINTDLNQGAKGKFIYLCYTKDPAAIPSDEDGLPIRGLRVIGNPQVENVVTPYGFTRINKDLNEGAKGEYIYVCFSRHLD

SEQ ID NO: 77 - DNA, 1353 bp, Huperzia carinata
atggcccaaatcgagccattacctggatcggatgcaatcggacacagttatgatgtattcggattctatgccaaccccaagagcgtgaaaagagagctcttcgactttgcccctcagcaagaaattactgaagagggccacacttggctcctttccactgatattgtaaatactgctgtccgagatacggaaataaaaaccgtctctcttcgcacaaaagatgaatactccacggagctggctgcaagcgtaaaagtgtccggcagctatggcggcttctcggcttcggtagagtctgatttctcccaaagcatcagccaggagacggactccacttacacttcagttcgtacaaatgtgaccaaatggaagctcggtctcaagccaactgtcgaagaactgcgttccatgttgacgccttcgttcaaggaggcattggcgagtatggagtcggaggagctgtttacgacgtacgggacatattatctgagtgaggtgttggtgggaggtcgcgcagattacgtggccaccaccaaaaccagtgcattcagctctgatactcaaatcagcgtagttgcggagagttcattcaagtccgtggctggcatggaggtatcctcccagtacaatgagcttatcaagaaatttcaagagaacagctccactcgtctgtacgccatcggtgggaccgcactctccagcatcacagacacggccacttacaacgcatggctcagttcgattgatacacttcccgtcttctgtggattcactagcgcaagtcttaagcccatctgggaactcgctgaatcctctcagcgccaggagatcctgcaaaaggctgcgcagacctttatcccgctcgaaatcagacgaaatgcgatcgttgacgtagctattatcgtgtccgacaaccatctggtgaatcctccctacggctttacgaagatcgattttgatctgaaccgcggtgccaagggcaaatttatctatttgtgctacaagcaacagaagatatcagtagcaggatcccctgcggatccgaaacccatcactgccttgaacgtggtttctagcgattaccatgatccatccgctccttcaggttataccatgatcaacacagatctgaaccagggtgcgaagggcaagtttatctatctctgctacacaaaagatccggctgcaatacccagcgacgaggatggactgcccatacgtggcctccgcgttattggtaacccacaagtcgagaatgtggttacaccttacggattcacgaggatcaataaagatctgaatgagggtgcaaagggagagtttatctacgtttgtttctcacgtcatttagac

SEQ ID NO: 78 - protein, 451 aa, Huperzia carinata
MAQIEPLPGSDAIGHSYDVFGFYANPKSVKRELFDFAPQQEITEEGHTWLLSTDIVNTAVRDTEIKTVSLRTKDEYSTELAASVKVSGSYGGFSASVESDFSQSISQETDSTYTSVRTNVTKWKLGLKPTVEELRSMLTPSFKEALASMESEELFTTYGTYYLSEVLVGGRADYVATTKTSAFSSDTQISVVAESSFKSVAGMEVSSQYNELIKKFQENSSTRLYAIGGTALSSITDTATYNAWLSSIDTLPVFCGFTSASLKPIWELAESSQRQEILQKAAQTFIPLEIRRNAIVDVAIIVSDNHLVNPPYGFTKIDFDLNRGAKGKFIYLCYKQQKISVAGSPADPKPITALNVVSSDYHDPSAPSGYTMINTDLNQGAKGKFIYLCYTKDPAAIPSDEDGLPIRGLRVIGNPQVENVVTPYGFTRINKDLNEGAKGEFIYVCFSRHLD

SEQ ID NO: 79 - DNA, 1353 bp, Huperzia carinata
atggcccaaatcaagccactacctggatctgattcagtcggacacaattatgatgtattcggattctttgccaaccccaagagcgtgaaaagacagctctttgactttgcccctcaggaagaaattactttagagggccacacttggctcctttccactgatattgaatatactattgtccgagatatggagataaaaactctctcttatcgcacaaaagatgcatactccacggagctggctgcaagcgtaaaagtgtccggcagctatggcggcttctcggcttcggtagagtctgatttctcccaaagcatcagccaggagacggactccacttacacttcagttcgtacaaatgtgaccaaatggaagctcggtctcaagccaactgtcgaagaactgcgttccatgttgacgccttcgttcaaggaggcattggcgagtatggagtcggaggagctgtttacgacgtacgggacatattatctgagtgaggtgttggtgggaggtcgcgcagattacgtggccaccaccaaaaccagtgcattcagctctgatactcaaatcagcgtagttgcggagagttcattcaagtccgtggctggcatggaggtatcctcccagtacaaggagcttatcaagaaatttcaagagaacagctccactcgtctgtacgccatcggtgggaccgcactctccagcatcacagacacggccacttacaacgcatggctcagttcgattgatacacttcccgtcttctgtggattcactagcgcaagtcttaagcccatctgggaactcgctgaatcctctcagcgccaggagatcctgcaaaaggctgcgcagacctttatcccgctcgaaatcagacgaaatgcgatcgttgacgtagctattatcgtgtccgacaaccatctggtgaatcctccctacggctttacgaagatcgattttgatctgaaccgcggtgccaagggcaaatttatctatttgtgctacaagcaacagaagatatcagtagcaggatcccctgcggatccgaaacccatcactgccttgaacgtggtttctagcgattaccatgatccatccgctccttcaggttataccatgatcaacacagatctgaaccagggtgcgaagggcaagtttatctatctctgctacacaaaagatccggctgcaatacccagcgacgaggatggactgcccatacgtggcctccgcgttattggtaacccacaagtcgagaatgtggttacaccttacggattcacgaggatcaataaagatctgaatgagggtgcaaagggagagtttatctacgtttgtttctcacgtcatttagac

SEQ ID NO: 80 - protein, 451 aa, Huperzia carinata
MAQIKPLPGSDSVGHNYDVFGFFANPKSVKRQLFDFAPQEEITLEGHTWLLSTDIEYTIVRDMEIKTLSYRTKDAYSTELAASVKVSGSYGGFSASVESDFSQSISQETDSTYTSVRTNVTKWKLGLKPTVEELRSMLTPSFKEALASMESEELFTTYGTYYLSEVLVGGRADYVATTKTSAFSSDTQISVVAESSFKSVAGMEVSSQYKELIKKFQENSSTRLYAIGGTALSSITDTATYNAWLSSIDTLPVFCGFTSASLKPIWELAESSQRQEILQKAAQTFIPLEIRRNAIVDVAIIVSDNHLVNPPYGFTKIDFDLNRGAKGKFIYLCYKQQKISVAGSPADPKPITALNVVSSDYHDPSAPSGYTMINTDLNQGAKGKFIYLCYTKDPAAIPSDEDGLPIRGLRVIGNPQVENVVTPYGFTRINKDLNEGAKGEFIYVCFSRHLD

SEQ ID NO: 81 - DNA, 1353 bp, Huperzia carinata
atggcccaaatcgagccattacctggatcggatgcaatcggacacagttatgatgtattcggattctatgccaaccccaagagcgtgaaaagagagctcttcgactttgcccctcagcaagaaattactgaagagggccacacttggctcctttccactgatattgtaaatactgctgtccgagatacggaaataaaaaccgtctctcttcgcacaaaagatgaatactccacggagctggctgcaagcgtaaaagtgtccggcagctatggcggcttctcggcttcggtagagtctgatttctcccaaagcatcagccaggagacggactccacttacacttcagttcgtacaaatgtgaccaaatggaagctcggtctcaagccaactgtcgaagaactgcgttccatgttgacgccttcgttcaaggaggcattggcgagtatggagtcggaggagctgtttacgacgtacgggacatattatctgagtgaggtgttggtgggaggtcgcgcagattacgtggccaccaccaaaaccagtgcattcagctctgatactcaaatcagcgtagttgcggagagttcattcaagtccgtggctggcatggaggtatcctcccagtacaaggagcttatcaagaaatttcaagagaacagctccactcgtctgtacgccatcggtgggaccgcactctccagcatcacagacacggccacttacaacgcatggctcagttcgattgatacacttcccgtcttctgtggattcactagcgcaagtcttaagcccatctgggaactcgctgaatcctctcagcgccaggagatcctgcaaaaggctgcgcagacctttatcccgctcgaaatcagacgaaatgcgatcgttgacgtagctattatcgtgtccgacaaccatctggtgaatcctccctacggctttacgaagatcgattttgatctgaaccgcggtgccaagggcaaatttatctatttgtgctacaagcaacagaagatatcagtagcaggatcccctgcggatccgaaacccatcactgccttgaacgtggtttctagcgattaccatgatccatccgctccttcaggttataccatgatcaacacagatctgaaccagggtgcgaagggcaagtttatctatctctgctacacaaaagatccggctgcaatacccagcgacgaggatggactgcccatacgtggcctccgcgttattggtaacccacaagtcgagaatgtggttacaccttacggattcacgaggatcaataaagatctgaatgagggtgcaaagggagagtttatctacgtttgtttctcacgtcatttagac

SEQ ID NO: 82 - protein, 451 aa, Huperzia carinata
MAQIEPLPGSDAIGHSYDVFGFYANPKSVKRELFDFAPQQEITEEGHTWLLSTDIVNTAVRDTEIKTVSLRTKDEYSTELAASVKVSGSYGGFSASVESDFSQSISQETDSTYTSVRTNVTKWKLGLKPTVEELRSMLTPSFKEALASMESEELFTTYGTYYLSEVLVGGRADYVATTKTSAFSSDTQISVVAESSFKSVAGMEVSSQYKELIKKFQENSSTRLYAIGGTALSSITDTATYNAWLSSIDTLPVFCGFTSASLKPIWELAESSQRQEILQKAAQTFIPLEIRRNAIVDVAIIVSDNHLVNPPYGFTKIDFDLNRGAKGKFIYLCYKQQKISVAGSPADPKPITALNVVSSDYHDPSAPSGYTMINTDLNQGAKGKFIYLCYTKDPAAIPSDEDGLPIRGLRVIGNPQVENVVTPYGFTRINKDLNEGAKGEFIYVCFSRHLD

SEQ ID NO: 83 - DNA, 1353 bp, Huperzia carinata
atggcccaaatagagccattacctggatcggatgcaatcggacacagttatgatgtattcggattctttgccagccccaagagcgtgaaaagacatctcttcgactttgcccctcaggaagaaattactttagaggaccacgattggctcctttccactgatattgaatatactgctgtccgagatacggatatcaaaaccatctcttatcgcacaaaagatgcatactccagggatctggctgcaagcgtaaaaatgtccggcggctatggcggcttttcggcttcggtggagtccgatttctcccaaagcatcagccaggagacggactccacttacacttcagttcgtacaaatgtgacgaaatggaagctcagactcaagccaactgtggaagaactgcgttccatgttgacgccttcgttcaaggaggcattggcaagtatggactcggaggagctgttttcgacgtacgggacatattatctgagtgaggtgttggtgggaggtcgcgcagattacgtggccaccaccaaaaccagtgcattcagctctgatactcaaatcagcgtagttgcggagagttcattcaagtccgtggctggcatggaggtatcctcccagtacaaggagcttatcaagaaatttcaagagaacagctccactcgtctgtacgccatcggtgggaccgcactctccagcatcacagacacggccacttacaacgcatggctcagttcgattgatacacttcccgtcttctgtggattcactagcgcaagtcttaagcccatctgggaactcgctgaatcctctcagcgccaggagatcctgcaaaaggctgcgcagacctttatcccgctcgaaatcagacgaaatgcgatcgttgacgtagctattatcgtgtccgacaaccatctggtgaatcctccctacggctttacgaagatcgattttgatctgaaccgcggtgccaagggcaaatttatctatttgtgctacaagcaacagaagatatcagtagcaggatcccctgcggatccgaaacccatcactgccttgaacgtggtttctagcgattaccatgatccatccgctccttcaggttataccatgatcaacacagatctgaaccagggtgcgaagggcaagtttatctatctctgctacacaaaagatccggctgcaatacccagcgacgaggatggactgcccatacgtggcctccgcgttattggtaacccacaagtcgagaatgtggttacaccttacggattcacgaggattaataaagatctgaatgagggtgcaaagggagagtatatctacgtttgtttctcacgtcatttagac

SEQ ID NO: 84 - protein, 451 aa, Huperzia carinata
MAQIEPLPGSDAIGHSYDVFGFFASPKSVKRHLFDFAPQEEITLEDHDWLLSTDIEYTAVRDTDIKTISYRTKDAYSRDLAASVKMSGGYGGFSASVESDFSQSISQETDSTYTSVRTNVTKWKLRLKPTVEELRSMLTPSFKEALASMDSEELFSTYGTYYLSEVLVGGRADYVATTKTSAFSSDTQISVVAESSFKSVAGMEVSSQYKELIKKFQENSSTRLYAIGGTALSSITDTATYNAWLSSIDTLPVFCGFTSASLKPIWELAESSQRQEILQKAAQTFIPLEIRRNAIVDVAIIVSDNHLVNPPYGFTKIDFDLNRGAKGKFIYLCYKQQKISVAGSPADPKPITALNVVSSDYHDPSAPSGYTMINTDLNQGAKGKFIYLCYTKDPAAIPSDEDGLPIRGLRVIGNPQVENVVTPYGFTRINKDLNEGAKGEYIYVCFSRHLD

SEQ ID NO: 85 - DNA, 1353 bp, Huperzia carinata
atggtgaatatcgagccattaccaggatcggatgcaatcggacacagttatgatgtgttcggattttatgccaatcccaagagcgtaaagaaagagcttttcgactttgccgtccagaaagaaatcacttcagagggccacacttggctcctttccactgatattaaatatattgcagtcagagatacggaaataaaaaccttctcccttcgcacaaaagatgcatactcaagcgagctggctaaaagcgtaaaactgtccggcagctacggcggcttctcggaatcggtagagtcagacttctccgaaagcatcagcgatgagacggattccacatacacttcagttcgtacaaatgtgaacaagtggaagatcagtctgaagcacagtgtggaaaagctgcgctccctgttgaagcctgcgttgaaggagccattggcgagtatgaacgcggtggagctgttgagtacgtatgggacacattatctgggcgaggtgttggtgggaggtcgtgcagattttgtggccaccaccaaaaccagtgcattcagctcggacactaaaatcagcatagtagcggagagttctttcaagtccgtggctggcatgaaagtatccgcggagcaaaagcagcttatcgaaaacttccaagaaaacagctccactagtctgtacgccatcggtgggagcgcactctccagcatcacagacacggccacttacaacgcatggctcagttccattgatacacgtcccgtcttctgtggattcactcgcgacagtcttaggcccatctgggagctcgctgaatcccctcagcgccgggagattctccgaaaagctacccaaacgtttatcccaccagaaatcacacgaaatgcaatcgttggcgtagatattatcatgtctgacaactattgggtgaatcctccctacggctatacgaagatcgattatgatctgaaccgcaatgccaagggcaaatatatcttcttgtgttacaaacaacagaagatatcagtagctggatccccagcggatcccaagcccatcactgccttgtacgtggcttctggcgatgatgataatccatatgttcccgcaggttacaccaagatcgacaaagatttgaacaaagatgctgggggcaagtttatctatctctgttacacaaaagatccggctgcaatacccaacgacgaggatggactgcccatacgtggcatccgcgttatcggcaatgaaaaacttgagaatgtggttaccccgtatggattcacgaggattgatgaagatctgaataagggtgcaaagggagactatatcttcgtttgtttctcacgtcatttagac

SEQ ID NO: 86 - protein, 451 aa, Huperzia carinata
MVNIEPLPGSDAIGHSYDVFGFYANPKSVKKELFDFAVQKEITSEGHTWLLSTDIKYIAVRDTEIKTFSLRTKDAYSSELAKSVKLSGSYGGFSESVESDFSESISDETDSTYTSVRTNVNKWKISLKHSVEKLRSLLKPALKEPLASMNAVELLSTYGTHYLGEVLVGGRADFVATTKTSAFSSDTKISIVAESSFKSVAGMKVSAEQKQLIENFQENSSTSLYAIGGSALSSITDTATYNAWLSSIDTRPVFCGFTRDSLRPIWELAESPQRREILRKATQTFIPPEITRNAIVGVDIIMSDNYWVNPPYGYTKIDYDLNRNAKGKYIFLCYKQQKISVAGSPADPKPITALYVASGDDDNPYVPAGYTKIDKDLNKDAGGKFIYLCYTKDPAAIPNDEDGLPIRGIRVIGNEKLENVVTPYGFTRIDEDLNKGAKGDYIFVCFSRHLD

SEQ ID NO: 87 - DNA, 1353 bp, Huperzia carinata
atggtgaatatcgagccattaccaggatcggatgcaatcggacacagttatgatgtgttcggattttatgccaatcccaagagcgtaaagaaagagcttttcgactttgccgtccagaaagaaatcacttcagagggccacacttggctcctttccactgatattaaatatattgcagtcagagatacggaaataaaaaccttctcccttcgcacaaaagatgcatactcaagcgagctggctaaaagcgtaaaactgtccggcagctacggcggcttctcggaatcggtagagtcagacttctccgaaagcatcagcgatgagacggattccacatacacttcagttcgtacaaatgtgaacaagtggaagatcagtctgaagcacagtgtggaaaagctgcgctccctgttgaagcctgcgttgaaggagccattggcgagtatgaacgcggtggagctgttgagtacgtatgggacacattatctgggcgaggtgttggtgggaggtcgtgcagattttgtggccaccaccaaaaccagtgcattcagctcggacactaaaatcagcatagtagcggagagttctttcaagtccgtggctggcatgaaagtatccgcggagcaaaagcagcttatcgaaaacttccaagaaaacagctccactagtctgtacgccatcggtgagagcgcactctccagcatcacagacacggccacttacaacgcatggctcagttccattgatacacgtcccgtcttctgtggattcactcgcgacagtcttaggcccatctgggagctcgctgaatcccctcagcgccgggagattctccgaaaagctacccaaacgtttatcccaccagaaatcacacgaaatgcaatcgttggcgtagatattatcatgtctgacaactattgggtgaatcctccctacggctatacgaagatcgattatgatctgaaccgcaatgccaagggcaaatatatcttcttgtgttacaaacaacagaagatatcagtagctggatccccagcggatcccaagcccatcactgccttgtacgtggcttctggcgatgatgataatccatatgttcccgcaggttacaccaagatcgacaaagatttgaacaaagatgctgggggcaagtttatctatctctgttacacaaaagatccggctgcaatacccaacgacgaggatggactgcccatacgtggcatccgcgttatcggcaatgaaaaacttgagaatgtggttaccccgtatggattcacgaggattgatgaagatctgaataagggtgcaaagggagactatatcttcgtttgtttctcacgtcatttagac

SEQ ID NO: 88 - protein, 451 aa, Huperzia carinata
MVNIEPLPGSDAIGHSYDVFGFYANPKSVKKELFDFAVQKEITSEGHTWLLSTDIKYIAVRDTEIKTFSLRTKDAYSSELAKSVKLSGSYGGFSESVESDFSESISDETDSTYTSVRTNVNKWKISLKHSVEKLRSLLKPALKEPLASMNAVELLSTYGTHYLGEVLVGGRADFVATTKTSAFSSDTKISIVAESSFKSVAGMKVSAEQKQLIENFQENSSTSLYAIGESALSSITDTATYNAWLSSIDTRPVFCGFTRDSLRPIWELAESPQRREILRKATQTFIPPEITRNAIVGVDIIMSDNYWVNPPYGYTKIDYDLNRNAKGKYIFLCYKQQKISVAGSPADPKPITALYVASGDDDNPYVPAGYTKIDKDLNKDAGGKFIYLCYTKDPAAIPNDEDGLPIRGIRVIGNEKLENVVTPYGFTRIDEDLNKGAKGDYIFVCFSRHLD

SEQ ID NO: 89 - DNA, 1353 bp, Huperzia carinata
atggtgaatatcgagccattaccaggatcggatgcaatcggacacagttatgatgtgttcggattttatgccaatcccaagagcgtaaagaaagagcttttcgactttgccgtccagaaagaaatcacttcagagggccacacttggctcctttccactgatattaaatatattgcagtcagagatacggaaataaaaaccttctcccttcgcacaaaagatgcatactcaagcgagctggctaaaagcgtaaaactgtccggcagctacggcggcttctcggaatcggtagagtcagacttctccgaaagcatcagcgatgagacggattccacatacacttcagttcgtacaaatgtgaacaagtggaagatcagtctgaagcacagtgtggaaaagctgcgctccctgttgaagcctgcgttgaaggagccattggcgagtatgaacgcggtggagctgttgagtacgtatgggacacattatctgggcgaggtgttggtgggaggtcgtgcagattatgtggccaccaccaaaaccagtgcattcagctccagcactaaaatcagcacagtagcggagagttctttcaaatccatggctggcatgaaggtatctgccgcgcacatgcagcttatccagaaattccaagagaacagctccactagtctgtacgccatcggtggcagcgctctctccaacatcacagatgcgaccacttacaatgcatggctccgttcaattgatacgcgtcccgtcttctgtggattcactcgcgacagtcttaggcccatctgggaactcgctgaatcccctcagcgccgggagattctccgaaaagctacccaaacgtttatcccatccggaatcacacgaaatgcaatcgttggcatagatattatcatctcagacagctattgggtgaatcctccctacggctatacgaagatcaattatgatctgaaccgcaatgccaagggcaaatatatcttcttgtgttacaaacaacagaaaatatcagtagctgaatccccagcggatccgaagcccatcactgccttgtacgtgagttccggagatgatgataatccatacgttccaccaggttacaccaagatcaacaaagatctgaacaagggtgctgggggaaagtttatctatctctgttacacaaaagatccggctgcaatacccagccacgaggatggactgcccatacgtggcatccgcgttattggtaacgaaaaactggagaacgtggttacaccttacggatacacgaggattgatgaagatctgaacaagggtgcaggtggagactatatcttcgtttgtttctcacgtcatttagac

SEQ ID NO: 90 - protein, 451 aa, Huperzia carinata
MVNIEPLPGSDAIGHSYDVFGFYANPKSVKKELFDFAVQKEITSEGHTWLLSTDIKYIAVRDTEIKTFSLRTKDAYSSELAKSVKLSGSYGGFSESVESDFSESISDETDSTYTSVRTNVNKWKISLKHSVEKLRSLLKPALKEPLASMNAVELLSTYGTHYLGEVLVGGRADYVATTKTSAFSSSTKISTVAESSFKSMAGMKVSAAHMQLIQKFQENSSTSLYAIGGSALSNITDATTYNAWLRSIDTRPVFCGFTRDSLRPIWELAESPQRREILRKATQTFIPSGITRNAIVGIDIIISDSYWVNPPYGYTKINYDLNRNAKGKYIFLCYKQQKISVAESPADPKPITALYVSSGDDDNPYVPPGYTKINKDLNKGAGGKFIYLCYTKDPAAIPSHEDGLPIRGIRVIGNEKLENVVTPYGYTRIDEDLNKGAGGDYIFVCFSRHLD

SEQ ID NO: 91 - DNA, 1353 bp, Huperzia carinata
atggtgaatatcgagccattaccaggatcggatgcaatcggacacagttatgatgtgttcggattttatgccaatctcaagagcgtaaagaaagagcttttcgactttgccgtccagaaagaaatcacttcagagggccacacttggctcctttccactgatattaaatatattgcagtcagagatacggaaataaaaaccttctcccttcgcacaaaagatgcatactcaagcgagctggctaaaagcgtaaaactgtccggcagctacggcggcttctcggaatcggtagagtcagacttctccgaaagcatcagcgatgagacggattccacatacacttcagttcgtacaaatgtgaacaagtggaagatcagtctgaagcacagtgtggaaaagctgcgctccctgttgaagcctgcgttgaaggagccattggcgagtatgaacgcggtggagctgttgagtacgtatgggacacattatctgggcgaggtgttggtgggaggtcgtgcagattatgtggccaccaccaaaaccagtgcattcagctccagcactaaaatcagcacagtagcggagagttctttcaaatccatggctggcatgaaggtatctgccgcgcacatgcagcttatccagaaattccaagagaacagctccactagtctgtacgccatcggtggcagcgctctctccaacatcacagatgcgaccacttacaatgcatggctccgttcaattgatacgcgtcccgtcttctgtggattcactcgcgacagtcttaggcccatctgggaactcgctgaatcccctcagcgccgggagattcttcgaaaagctacccaaacgtttatcccatccggaatcacacgaaatgcaatcgttggcatagatattatcatctcagacagctattgggtgaatcctccctacggctatacgaagatcaattatgatctgaaccgcaatgccaagggcaaatatatcttcttgtgttacaaacaacagaaaatatcagtagctgaatccccagcggatccgaagcccatcactgccttgtacgtgagttccggagatgatgataatccatacgttccaccaggttacaccaagatcaacaaagatctgaacaagggtgctgggggaaagtttatctatctctgttacacaaaagatccggctgcaatacccagccacgaggatggactgcccatacgtggcatccgcgttattggtaacgaaaaactggagaacgtggttacaccttacggatacacgaggattgatgaagatctgaacaagggtgcaggtggagactatatcttcgtttgtttctcacgtcatttagac

SEQ ID NO: 92 - protein, 451 aa, Huperzia carinata
MVNIEPLPGSDAIGHSYDVFGFYANLKSVKKELFDFAVQKEITSEGHTWLLSTDIKYIAVRDTEIKTFSLRTKDAYSSELAKSVKLSGSYGGFSESVESDFSESISDETDSTYTSVRTNVNKWKISLKHSVEKLRSLLKPALKEPLASMNAVELLSTYGTHYLGEVLVGGRADYVATTKTSAFSSSTKISTVAESSFKSMAGMKVSAAHMQLIQKFQENSSTSLYAIGGSALSNITDATTYNAWLRSIDTRPVFCGFTRDSLRPIWELAESPQRREILRKATQTFIPSGITRNAIVGIDIIISDSYWVNPPYGYTKINYDLNRNAKGKYIFLCYKQQKISVAESPADPKPITALYVSSGDDDNPYVPPGYTKINKDLNKGAGGKFIYLCYTKDPAAIPSHEDGLPIRGIRVIGNEKLENVVTPYGYTRIDEDLNKGAGGDYIFVCFSRHLD

SEQ ID NO: 93 - DNA, 1353 bp, Huperzia carinata
atggtgaatatcgagccattaccaggatcggatgcaatcggacacagttatgatgtgttcggattttatgccaatcccaagagcgtaaagaaagagcttttcgactttgccgtccagaaagaaatcacttcagagggccacacttggctcctttccactgatattaaatatattgcagtcagagatacggaaataaaaaccttctcccttcgcacaaaagatgcatactcaagcgagctggctaaaagcgtaaaactgtccggcagctacggcggcttctcggaatcggtagagtcagacttctccgaaagcatcagcgatgagacggattccacatacacttcagttcgtacaaatgtgaacaagtggaagatcagtctgaagcacagtgtggaaaagctgcgctccctgttgaagcctgcgttgaaggagccattggcgagtatgaacgcggtggagctgttgagtacgtatgggacacattatctgggcgaggtgttggtgggaggtcgtgcagattatgtggccaccaccaaaaccagtgcattcagctccagcactaaaatcagcacagtagcggagagttttttcaaatccatggctggcatgaaggtatctgccgcgcacatgcagcttatccagaaattccaagagaacagctccactagtctgtacgccatcggtggcagcgctctctccaacatcacagatgcgaccacttacaatgcatggctccgttcaattgatacgcgtcccgtcttctgtggattcactcgcgacagtcttaggcccatctgggaactcgctgaatcccctcagcgccgggagattctccgaaaagctacccaaacgtttatcccatccggaatcacacgaaatgcaatcgttggcatagatattatcatctcagacagctattgggtgaatcctccctacggctatacgaagatcaattatgatctgaaccgcaatgccaagggcaaatatatcttcttgtgttacaaacaacagaaaatatcagtagctgaatccccagcggatccgaagcccatcactgccttgtacgtgagttccggagatgatgataatccatacgttccaccaggttacaccaagatcaacaaagatctgaacaagggtgctgggggaaagtttatctatctctgttacacaaaagatccggctgcaatacccagccacgaggatggactgcccatacgtggcatccgcgttattggtaacgaaaaactggagaacgtggttacaccttacggatacacgaggattgatgaagatctgaacaagggtgcaggtggagactatatcttcgtttgtttctcacgtcatttagac

SEQ ID NO: 94 - protein, 451 aa, Huperzia carinata
MVNIEPLPGSDAIGHSYDVFGFYANPKSVKKELFDFAVQKEITSEGHTWLLSTDIKYIAVRDTEIKTFSLRTKDAYSSELAKSVKLSGSYGGFSESVESDFSESISDETDSTYTSVRTNVNKWKISLKHSVEKLRSLLKPALKEPLASMNAVELLSTYGTHYLGEVLVGGRADYVATTKTSAFSSSTKISTVAESFFKSMAGMKVSAAHMQLIQKFQENSSTSLYAIGGSALSNITDATTYNAWLRSIDTRPVFCGFTRDSLRPIWELAESPQRREILRKATQTFIPSGITRNAIVGIDIIISDSYWVNPPYGYTKINYDLNRNAKGKYIFLCYKQQKISVAESPADPKPITALYVSSGDDDNPYVPPGYTKINKDLNKGAGGKFIYLCYTKDPAAIPSHEDGLPIRGIRVIGNEKLENVVTPYGYTRIDEDLNKGAGGDYIFVCFSRHLD

SEQ ID NO: 95 - DNA, 1434 bp, Ophioglossum pendulum; identical to SEQ ID NO: 57

SEQ ID NO: 96 - protein, 478 aa, Ophioglossum pendulum; identical to SEQ ID NO: 58

SEQ ID NO: 97 - DNA, 1434 bp, Ophioglossum pendulum
atggaacccaacaaaggtggtgctccagccatgaaaaatgtagccaaaccttccacaaagagactcataccgtcatccattgctgcatcatcgcaaacatctgcaaatgcattaaccgagccattgcctggctctgatgccatcggccagagctacgatgcgttcgggttcttcgccaatcccagaagcatcatgaaggagttgtttgagttcagtcctcaagaggagatagtcgtggaaggaaatacctggcttctctcttcggacttcgtttacaccgcaattagagacactgagacctccacggtctcacgtcgcaccaaggacgactactccaaggaattggctgtgaaggtgaagctgtctggaagctatggctatttttctgcctccgttgagtctgatttctctcagagcatttccgatgcgacggacaccacatacacttcagttcgcacccacgtcaacaagtggaggctgagcctgaaggacgatgttggggcccttcgctcgaagctgctgcctggcttcaagcaggcgctggctaccatggatgctacgcagctctttgacacgttcgggactcactatgtgagcgaggtgcttgtgggtgggcgtgcagactacgttgccaccaccaagaccagcgcgttcagctcatccaccagcatcagcgtagcggcagaagcatcattccagtccatcgcgggtggggaggtgtctccggagtccaaggtgcttgcggagatgctgagagagaacagcagcacacgcctgtacgctcttggcgggagtgccctccccaacatcacagatccagccacgtacaacgcctggctggagtccattgacaccatccctgtcttctgcggattcactcaaaacagcctcaagcccatctcggagcttgctgactccgctcaacgccgggacgctctggccaaagcctcccaaagctatatcccatcatacgtgactcgtcctgcagtggttggcttggaggtcataatatcggacagcaactcggagagccctccctatggctacaccagaatagactacgacctcaaccgcaacgcaggaggcaaatacgtgttcctctgctacaagcagaagaacatttcagtgggaggggatgccgatgccatcaccgacgtccttgtcgtctacggaaatgaccgaaatccatctgtgccgtctggctacaccaagatcgacaaggacctcaactccggggcaggcggtaagtatatctacttctgctactccaaggacaagcggaagcaagaggagggactgcccattcgtgggcttcgtgttgttgggcctcacccaacctcagtggcaccttacggattctctaagatcgacatagatctgaatatgggtgcaggaggagattttatatacctttgcaaatcacgccatttggag

SEQ ID NO: 98 - protein, 478 aa, Ophioglossum pendulum
MEPNKGGAPAMKNVAKPSTKRLIPSSIAASSQTSANALTEPLPGSDAIGQSYDAFGFFANPRSIMKELFEFSPQEEIVVEGNTWLLSSDFVYTAIRDTETSTVSRRTKDDYSKELAVKVKLSGSYGYFSASVESDFSQSISDATDTTYTSVRTHVNKWRLSLKDDVGALRSKLLPGFKQALATMDATQLFDTFGTHYVSEVLVGGRADYVATTKTSAFSSSTSISVAAEASFQSIAGGEVSPESKVLAEMLRENSSTRLYALGGSALPNITDPATYNAWLESIDTIPVFCGFTQNSLKPISELADSAQRRDALAKASQSYIPSYVTRPAVVGLEVIISDSNSESPPYGYTRIDYDLNRNAGGKYVFLCYKQKNISVGGDADAITDVLVVYGNDRNPSVPSGYTKIDKDLNSGAGGKYIYFCYSKDKRKQEEGLPIRGLRVVGPHPTSVAPYGFSKIDIDLNMGAGGDFIYLCKSRHLE

SEQ ID NO: 99 - DNA, 1434 bp, Ophioglossum pendulum
atggaacccaacaaaggtggtgctccagccatgaaaaatgtagccaaaccttccacaaagagactcataccgtcatccattgctgcatcatcgcaaacatctgcaaatgcattaaccgagccattgcctggctctgatgccatcggccagagctacgatgcgttcgggttcttcgccaatcccagaagcatcatgaaggagttgtttgagttcagtcctcaagaggagatagtcgtggaaggaaatacctggcttctctcttcggacttcgtttacaccgcaattagagacactgagacctccacggtctcacgtcgcaccaaggacgactactccaaggaattggctgtgaaggtgaagctgtctggaagctatggctttttttctgcctccgttgagtctgatttctctcagagcatttccgatgcgacggacaccacatacacttcagttcgcacccacgtcaacaagtggaggctgagcctgaaggacgatgttggggcccttcgctcgaagctgctgcctggcgtcaagcaggcgctggctaccatggatgctacgcagctctttgacacgttcgggactcactatgtgagcgaggtgcttgtgggtgggcgtgcagactacgttgccaccaccaagaccagcgcgttcagctcatccaccagcatcagcgtagcggcagaagcatcattccagtccatcgcgggtggggaggtgtctccggagtccaaggtgcttgcggagatgctgagagagaacagcagcacacgcctgtacgctcttggcgggagtgccctccccaacatcacagatccagccacgtacaacgcctggctggagtccattgacaccatccctgtcttctgcggattcactcaaaacagcctcaagcccatctcggagcttgctgactccgctcaacgccgggacgctctggccaaagcctcccaaagctatatcccatcatacgtgactcgtcctgcagtggttggcttggaggtcataatatcggacagcaactcggagagccctccctatggctacaccagaatagactacgacctcaaccgcaacgcaggaggcaaatacgtgttcctctgctacaagcagaagaacatttcagtgggaggggatgccgatgccatcaccgacgtccttgtcgtctacggaaatgaccgaaatccatctgtgccgtctggctacaccaagatcgacaaggacctcaactccggggcaggcggtaagtatatctacttctgctactccaaggacaagcggaagcaagaggagggactgcctattcgtgggcttcgtgttgttgggcctcacccaacctcagtggcaccttacggattctctaagatcgacatagatctgaatatgggtgcaggaggagattttatatacctttgcaaatcacgccatttggag

SEQ ID NO: 100 - protein, 478 aa, Ophioglossum pendulum
MEPNKGGAPAMKNVAKPSTKRLIPSSIAASSQTSANALTEPLPGSDAIGQSYDAFGFFANPRSIMKELFEFSPQEEIVVEGNTWLLSSDFVYTAIRDTETSTVSRRTKDDYSKELAVKVKLSGSYGFFSASVESDFSQSISDATDTTYTSVRTHVNKWRLSLKDDVGALRSKLLPGVKQALATMDATQLFDTFGTHYVSEVLVGGRADYVATTKTSAFSSSTSISVAAEASFQSIAGGEVSPESKVLAEMLRENSSTRLYALGGSALPNITDPATYNAWLESIDTIPVFCGFTQNSLKPISELADSAQRRDALAKASQSYIPSYVTRPAVVGLEVIISDSNSESPPYGYTRIDYDLNRNAGGKYVFLCYKQKNISVGGDADAITDVLVVYGNDRNPSVPSGYTKIDKDLNSGAGGKYIYFCYSKDKRKQEEGLPIRGLRVVGPHPTSVAPYGFSKIDIDLNMGAGGDFIYLCKSRHLE

SEQ ID NO: 101 - DNA, 1434 bp, Ophioglossum pendulum
atggaacccaacaaaggtggtgctccagccatgaaaaatgtagccaaaccttccacaaagagactcataccgtcatccattgctgcatcatcgcaaacatctgcaaatgcattaaccgagccattgcctggctctgatgccatcggccagagctacgatgcattcgggttcttcgccaatcccagaagcatcatgaaggagttgtttgagttcagtcctcaagaggagatagtcgtggaaggaaatacctggcttctctcttcggacttcgtttacaccgcaattagagacactgagacctccacggtctcacgtcgcaccaaggacgactactccaaggaattggctgtgaaggtgaagctgtctggaagctatggctttttttctgcctccgttgagtctgatttctctcagagcatttccgatgtgacggacaccacatacacttcagttcgcacccacgtcaacaagtggaggctgagcctgaaggacgatgttggggcccttcgctcgaagctgctgcctggcttcaagcaggcgctggctaccatggatgctacgcagctctttgacacgttcgggactcactatgtgagcgaggtgcttgtgggtgggcgtgcagactacgttgccaccaccaagaccagcgcgttcagctcatccaccagcatcagcgtagcggcagaagcatcattccagtccatcgcgggtggggaggtgtctccggagtccaaggagcttgcggagacgctgagagagaacagcagcacacgcctgtacgctcttggcgggagtgccctccccaacatcacagatccagccacgtacaacgcctggctggagtccattgacaccatccctgtcttctgcggattcactcaaaacagcctcaagcccatctcggagcttgctgactccgctcaacgccgggacgctctggccaaagcctcccaaagctatatcccatcatacgtgactcgtcctgcagtggttggcttggaggtcataatatcggacagcaactcggagagccctccctatggctacaccagaatagactacgacctcaaccgcaacgcaggaggcaaatacgtgttcctctgctacaagcagaagaacatttcagtgggaggggatgccgatgccatcaccgacgtccttgtcgtctacggaaatgaccgaaatccatctgtgccgtctggctacaccaagatcgacaaggacctcaactccggggcaggcggtaagtatatctacttctgctactccaaggacaagcggaagcaagaggagggactgcccattcgtgggcttcgtgttgttgggcctcacccaacctcagtggcaccttacggattctctaagatcgacatagatctgaatatgggtgcaggaggagattttatatacctttgcaaatcacgccatttggag

SEQ ID NO: 102 - protein, 478 aa, Ophioglossum pendulum
MEPNKGGAPAMKNVAKPSTKRLIPSSIAASSQTSANALTEPLPGSDAIGQSYDAFGFFANPRSIMKELFEFSPQEEIVVEGNTWLLSSDFVYTAIRDTETSTVSRRTKDDYSKELAVKVKLSGSYGFFSASVESDFSQSISDVTDTTYTSVRTHVNKWRLSLKDDVGALRSKLLPGFKQALATMDATQLFDTFGTHYVSEVLVGGRADYVATTKTSAFSSSTSISVAAEASFQSIAGGEVSPESKELAETLRENSSTRLYALGGSALPNITDPATYNAWLESIDTIPVFCGFTQNSLKPISELADSAQRRDALAKASQSYIPSYVTRPAVVGLEVIISDSNSESPPYGYTRIDYDLNRNAGGKYVFLCYKQKNISVGGDADAITDVLVVYGNDRNPSVPSGYTKIDKDLNSGAGGKYIYFCYSKDKRKQEEGLPIRGLRVVGPHPTSVAPYGFSKIDIDLNMGAGGDFIYLCKSRHLE

SEQ ID NO: 103 - DNA, 1434 bp, Ophioglossum pendulum
atggaacccaacaaaggtggtgctccagccatgaaaaatgtagccaaaccttccacaaagagactcataccgtcatccattgctgcatcatcgcaaacatctgcaaatgcattaaccgagccattgcctggctctgatgccatcggccagagctacgatgcgttcgggttcttcgccaatcccagaagcatcatgaaggagttgtttgagttcagtcctcaagaggagatagtcgtggaaggaaatacctggcttctctcttcggacttcgtttacaccgcaattagagacactgagacctccacggtctcacgtcgcaccaaggacgactactccaaggaattggctgtgaaggtgaagctgtctggaagctatggctatttttctgcctccgttgagtctgatttctctcagagcatttccgatgcgacggacaccacatacacttcagttcgcacccacgtcaacaagtggaggctgagcctgaaggacgatgttggggcccttcgctcgaagctgctgcctggcgtcaagcaggcgctggctaccatggatgctacgcagctctttgacacgttcgggactcactatgtgagcgaggtgcttgtgggtgggcgtgcagactacgttgccaccaccaagaccagcgcgttcagctcgtccaccagcatcagcgtagcggcagaagcatcattccagtccatcgcgggtggggaggtgtctccggagtccaaggtgcttgcggagatgctgagagagaacagcagcacacgcctgtacgctcttggcgggagtgccctccccaacatcacagatccagccacgtacaacgcctggctgcagtccattgacaccatccctgtcttctgcggattcactcaaaacagcctcaagcccatctcggagcttgctgactccggtcaacgccgggacgctctggccaaagcctcccaaagctatatcccatcatacgtgactcgtcctgcagtggttggcttggaggtcataatatcggacagcaactcggagagccctccctatggctacaccagaatagactacgacctcaaccgcaacgcaggaggcaaatacgtgttcctctgctacaagcagaagaacatttcagtgggaggggatgccgatgccatcaccgacgtccttgtcgtctacggaaatgaccgaaatccatctgtgccgtctggctacaccaagatcgacaaggacctcaactccggggcaggcggtaagtatatctacttctgctactccaaggacaagcggaagcaagaggagggactgcccattcgtgggcttcgtgttgttgggcctcacccaacctcagtggcaccttacggattctctaagatcgacatagatctgaatatgggtgcaggaggagattttatatacctttgcaaatcacgccatttggag

SEQ ID NO: 104 - protein, 478 aa, Ophioglossum pendulum
MEPNKGGAPAMKNVAKPSTKRLIPSSIAASSQTSANALTEPLPGSDAIGQSYDAFGFFANPRSIMKELFEFSPQEEIVVEGNTWLLSSDFVYTAIRDTETSTVSRRTKDDYSKELAVKVKLSGSYGYFSASVESDFSQSISDATDTTYTSVRTHVNKWRLSLKDDVGALRSKLLPGVKQALATMDATQLFDTFGTHYVSEVLVGGRADYVATTKTSAFSSSTSISVAAEASFQSIAGGEVSPESKVLAEMLRENSSTRLYALGGSALPNITDPATYNAWLQSIDTIPVFCGFTQNSLKPISELADSGQRRDALAKASQSYIPSYVTRPAVVGLEVIISDSNSESPPYGYTRIDYDLNRNAGGKYVFLCYKQKNISVGGDADAITDVLVVYGNDRNPSVPSGYTKIDKDLNSGAGGKYIYFCYSKDKRKQEEGLPIRGLRVVGPHPTSVAPYGFSKIDIDLNMGAGGDFIYLCKSRHLE

SEQ ID NO: 105 - DNA, 1434 bp, Ophioglossum pendulum
atggaacccaacaaaggtggtgctccagccatgaaaaatgtagccaaaccttccacaaagagactcataccgtcatccattgctgcatcatcgcaaacatctgcaaatgcattaaccgagccattgcctggctctgatgccatcggccagagctacgatgcattcgggttcttcgccaatcccagaagcatcatgaaggagttgttcgagttcagtcctcaagaggagatagtcgtggaaggaaatacctggcttctctcttcggacttcgtttacaccgcaattagagacactgagacctccacggtctcacgtcgcaccaaggacgactactccaaggaattggctctgaaggtgaagctgtctggaagctatggctttttttctgcctccgttgagtctgatttctctcagagcatttccgatgtgacggacaccacatacacttcagttcgcacccacgtcaacaagtggaggctgagcctgaaggacgatgttggggcccttcgctcgaagctgctgcctggcttcaagcaggcgctggctaccatggatgctacgcagctctttgacacgttcgggactcactatgtgagcgaggtgcttgtgggtgggcgtgcagactacgttgccaccaccaagaccagcgcgttcagctcatccaccagcatcagcgtagcggcagaagcatcattccagtccatcgcgggtggggaggtgtctccggagtccaaggtgcttgcggagacgctgagagagaacagcagcacacgcctgtacgctcttggcgggagtgccctccccaacatcacagatccagccacgtacaacgcctggctggagtccattgacaccatccctgtcttctgcggattcactcaaaacagcctcaagcccatctcggagcttgctgactccgctcaacgccgggacgctctggccaaagcctcccaaagctatatcccatcatacgtgactcgtcctgcagtggttggcttggaggtcataatatcggacagcaactcggagagccctccctatggctacaccagaatagactacgacctcaaccgcaacgcaggaggcaaatacgtgttcctctgctacaagcagaagaacatttcagtgggaggggatgccgatgccatcaccgacgtccttgtcgtctacggaaatgaccgaaatccatctgtgccgtctggctacaccaagatcgacaaggacctcaactccggggcaggcggtaagtatatctacttctgctactccaaggacaagcggaagcaagaggagggactgcctattcgtgggcttcgtgttgttgggcctcacccaacctcagtggcaccttacggattctctaagatcgacatagatctgaatatgggtgcaggaggagattttatatacctttgcaaatcacgccatttggag

SEQ ID NO: 106 - protein, 478 aa, Ophioglossum pendulum
MEPNKGGAPAMKNVAKPSTKRLIPSSIAASSQTSANALTEPLPGSDAIGQSYDAFGFFANPRSIMKELFEFSPQEEIVVEGNTWLLSSDFVYTAIRDTETSTVSRRTKDDYSKELALKVKLSGSYGFFSASVESDFSQSISDVTDTTYTSVRTHVNKWRLSLKDDVGALRSKLLPGFKQALATMDATQLFDTFGTHYVSEVLVGGRADYVATTKTSAFSSSTSISVAAEASFQSIAGGEVSPESKVLAETLRENSSTRLYALGGSALPNITDPATYNAWLESIDTIPVFCGFTQNSLKPISELADSAQRRDALAKASQSYIPSYVTRPAVVGLEVIISDSNSESPPYGYTRIDYDLNRNAGGKYVFLCYKQKNISVGGDADAITDVLVVYGNDRNPSVPSGYTKIDKDLNSGAGGKYIYFCYSKDKRKQEEGLPIRGLRVVGPHPTSVAPYGFSKIDIDLNMGAGGDFIYLCKSRHLE

SEQ ID NO: 107 - DNA, 1434 bp, Ophioglossum pendulum
atggaacccaacaaaggtggtgctccagccatgaaaaatgtagccaaaccttccacaaagagactcataccgtcatccattgctgcatcatcgcaaacatctgcaaatgcattaaccgagccattgcctggctctgatgccatcggccagagctacgatgcattcgggttcttcgccaatcccagaagcatcatgaaggagttgttcgagttcactcctcaagaggagatagtcgtggaaggaaatacctggcttctctcttcggacttcgtttacaccgcaattagagacactgagacctccacggtctcacgtcgcaccaaggacgactactccaaggaattggctgtgaaggtgaagctgtctggaagctatggctatttttctgcctccgttgagtctgatttctctcagagcatttccgatgcgacggacaccacatacacttcagttcgcacccacgtcaacaagtggaggctgagcctgaaggacgatgttggggcccttcgctcgaagctgctgcctggcttcaagcaggcgctggctaccatggatgctactcagctctttgacacgttcgggactcactatgtgagcgaggtgcttgtgggtgggcgtgcaaactacgttgccaccaccaagaccagcgcgttcagctcatccaccagcatcagcgtagcggcagaagcatcattccagtccatcgcgggtggggaggtgtctccggagtccaaggtgcttgcggagacgctgagagagaacagcagcacacgcctgtacgctcttggagggagtgccctccccaacatcacagatccagccacgtacaacgcctggctggagtccattgacaccatccctgtcttctgcggattcactcaaaacagcctcaagcccatctcggagcttgctgactccgctcaacgccgggacgctctggccaaagcctcccaaagctatatcccatcatacgtgactcgtcctgcagtggttggcttggaggtcataatatcggacagcaactcggagagccctccctatggctacaccagaatagactacgacctcaaccgcaacgcaggaggcaaatacgtgttcctctgctacaagcagaagaacatttcagtgggaggggatgccgatgccatcaccgacgtccttgtcgtctacggaaatgaccgaaatccatctgtgccgtctggctacaccaagatcgacaaggacctcaactccggggcaggcggtaagtatatctacttctgctactccaaggacaagcggaagcaagaggagggactgcccattcgtgggcttcgtgttgttgggcctcacccaacctcagtggcaccttacggattctctaagatcgacatagatctgaatatgggtgcaggaggagattttatatacctttgcaaatcacgccatttggag

SEQ ID NO: 108 - protein, 478 aa, Ophioglossum pendulum
MEPNKGGAPAMKNVAKPSTKRLIPSSIAASSQTSANALTEPLPGSDAIGQSYDAFGFFANPRSIMKELFEFTPQEEIVVEGNTWLLSSDFVYTAIRDTETSTVSRRTKDDYSKELAVKVKLSGSYGYFSASVESDFSQSISDATDTTYTSVRTHVNKWRLSLKDDVGALRSKLLPGFKQALATMDATQLFDTFGTHYVSEVLVGGRANYVATTKTSAFSSSTSISVAAEASFQSIAGGEVSPESKVLAETLRENSSTRLYALGGSALPNITDPATYNAWLESIDTIPVFCGFTQNSLKPISELADSAQRRDALAKASQSYIPSYVTRPAVVGLEVIISDSNSESPPYGYTRIDYDLNRNAGGKYVFLCYKQKNISVGGDADAITDVLVVYGNDRNPSVPSGYTKIDKDLNSGAGGKYIYFCYSKDKRKQEEGLPIRGLRVVGPHPTSVAPYGFSKIDIDLNMGAGGDFIYLCKSRHLE

SEQ ID NO: 109 - DNA, 1434 bp, Ophioglossum pendulum
atggaacccaacaaaggtggtgctccagccatgaaaaatgtagccaaaccttccacaaagagactcataccgtcatccattgctgcatcatcgcaaacatctgcaaatgcattaaccgagccattgcctggctctgatgccatcggccagagctacgatgcgttcgggttcttcgccaatcccagaagcatcatgaaggagttgtttgagttcagtcctcaagaggagatagtcgtggaaggaaatacctggcttctctcttcggacttcgtttacaccgcaattagagacactgagacctccacggtctcacgtcgcaccaaggacgactactccaaggaattggctgtgaaggtgaagctgtctggaagctatggctatttttctgcctccgttgagtctgatttctctcagagcatttccgatgcgacggacaccacatacacttcagttcgcacccacgtcaacaagtggaggctgagcctgaaggacgatgttggggcccttcgctcgaagctgctgcctggcgtcaagcaggcgctggctaccatggatgctacgcagctctttgacacgttcgggactcactatgtgagcgaggtgcttgtgggtgggcatgcagactacgttgccaccaccaagaccagcgcgttcagctcatccaccagcatcagcgtagcggcagaagcatcattccagtccatcgcgggtggggaggtgtctccggagtccaaggtgcttgcggagacgctgagagagaacagcagcacacgcctgtacgctcttggcgggagtgccctccccaacatcacagatccagccacgtacaacgcctggctgcagtccattgacaccatccctgtcttctgcggattcactcaaaacagcctcaagcccatctcggagcttgctgactccgctcaacgccgggacgctctggccaaagcctcccaaagctatatcccatcatacgtgactcgtcctgcagtggttggcttggaggtcataatatcggacagcaactcggagagccctccctatggctacaccagaatagactacgacctcaaccgcaacgcaggaggcaaatacgtgttcctctgctacaagcagaagaacatttcagtgggaggggatgccgatgccatcaccgacgtccttgtcgtctacggaaatgaccgaaatccatctgtgccgtctggctacaccaagatcgacaaggacctcaactccggggcaggcggtaagtatatctacttctgctactccaaggacaagcggaagcaagaggagggactgcccattcgtgggcttcgtgttgttgggcctcacccaacctcagtggcaccttacggattctctaagatcgacatagatctgaatatgggtgcaggaggagattttatatacctttgcaaatcacgccatttggag

SEQ ID NO: 110 - protein, 478 aa, Ophioglossum pendulum
MEPNKGGAPAMKNVAKPSTKRLIPSSIAASSQTSANALTEPLPGSDAIGQSYDAFGFFANPRSIMKELFEFSPQEEIVVEGNTWLLSSDFVYTAIRDTETSTVSRRTKDDYSKELAVKVKLSGSYGYFSASVESDFSQSISDATDTTYTSVRTHVNKWRLSLKDDVGALRSKLLPGVKQALATMDATQLFDTFGTHYVSEVLVGGHADYVATTKTSAFSSSTSISVAAEASFQSIAGGEVSPESKVLAETLRENSSTRLYALGGSALPNITDPATYNAWLQSIDTIPVFCGFTQNSLKPISELADSAQRRDALAKASQSYIPSYVTRPAVVGLEVIISDSNSESPPYGYTRIDYDLNRNAGGKYVFLCYKQKNISVGGDADAITDVLVVYGNDRNPSVPSGYTKIDKDLNSGAGGKYIYFCYSKDKRKQEEGLPIRGLRVVGPHPTSVAPYGFSKIDIDLNMGAGGDFIYLCKSRHLE

SEQ ID NO: 111 - DNA, 1434 bp, Ophioglossum pendulum
atggaacccaacaaaggtggtgctccagccatgaaaaatgtagccaaaccttccacaaagagactcataccgtcatccattgctgcatcatcgcaaacatctgcaaatgcattaaccgagccattgcctggctctgatgccatcggccagagctacgatgcgttcgggttcttcgccaatcccagaagcatcatgaaggagttgtttgagttcagtcctcaagaggagatagtcgtggaaggaaatacctggcttctctcttcggacttcgtttacaccgcaattagagacactgagacctccacggtctcacgtcgcaccaaggacgactactccaaggaattggctgtgaaggtgaagctgtctggaagctatggctttttttctgcctccgttgagtctgatttctctcagagcatttccgatgtgacggacaccacatacacttcagttcgcacccacgtcaacaagtggaggctgagcctgaaggacgatgttggggcccttcgctcgaagctgctgcctggcttcaagcaggcgctggctaccatggatgctacgcagctctttgacacgttcgggactcactatgtgagcgaggtgcttgtgggtgggcgtgcagactacgttgccaccaccaagaccagcgcgttcagctcatccaccagcatcagcgtagcggcagaagcatcattccagtccatcgcgggtggggaggtgtctccggagtccaaggtgcttgcggagacgctgagagagaacagcagcacacgcctgtacgctcttggcgggagtgccctccccaacatcacagatccagccacgtacaacgcctggctgcagtccattgacaccatccctgtcttctgcggattcactcaaaacagcctcaagcccatctcggagcttgctgactccgctcaacgccgggacgctctggccaaagcctcccaaagctatatcccatcatacgtgactcgtcctgcagtggttggcttggaggtcataatatcggacagcaactcggagagccctccctatggctacaccagaatagactacgacctcaaccgcaacgcaggaggcaaatacgtgttcctctgctacaagcagaagaacatttcagtgggaggggatgccgatgccatcaccgacgtccttgtcgtctacggaaatgaccgaaatccatctgtgccgtctggctacaccaagatcgacaaggacctcaactccggggcaggcggtaagtatatctacttctgctactccaaggacaagcggaagcaagaggagggactgcctattcgtgggcttcgtgttgttgggcctcacccaacctcagtggcaccttacggattctctaagatcgacatagatctgaatatgggtgcaggaggagattttatatacctttgcaaatcacgccatttggag

SEQ ID NO: 112 - protein, 478 aa, Ophioglossum pendulum
MEPNKGGAPAMKNVAKPSTKRLIPSSIAASSQTSANALTEPLPGSDAIGQSYDAFGFFANPRSIMKELFEFSPQEEIVVEGNTWLLSSDFVYTAIRDTETSTVSRRTKDDYSKELAVKVKLSGSYGFFSASVESDFSQSISDVTDTTYTSVRTHVNKWRLSLKDDVGALRSKLLPGFKQALATMDATQLFDTFGTHYVSEVLVGGRADYVATTKTSAFSSSTSISVAAEASFQSIAGGEVSPESKVLAETLRENSSTRLYALGGSALPNITDPATYNAWLQSIDTIPVFCGFTQNSLKPISELADSAQRRDALAKASQSYIPSYVTRPAVVGLEVIISDSNSESPPYGYTRIDYDLNRNAGGKYVFLCYKQKNISVGGDADAITDVLVVYGNDRNPSVPSGYTKIDKDLNSGAGGKYIYFCYSKDKRKQEEGLPIRGLRVVGPHPTSVAPYGFSKIDIDLNMGAGGDFIYLCKSRHLE

SEQ ID NO: 113 - DNA, 1434 bp, Ophioglossum pendulum
atggaacccaacaaaggtggtgctccagccatgaaaaatgtagccaaaccttccacaaagagactcataccgtcatccattgctgcatcatcgcaaccatctgcaaatgcattaaccgagccattgcctggctctgatgccatcggccagagctacgatgcattcgggttcttcgccaatcccagaagcatcatgaaggagttgttcgagttcagtcctcaagaggagatagtcgtggaaggaaatacctggcttctctcttcggacttcgtttacaccgcaattagagacactgagacctccacggtctcacgtcgcaccaaggacgactactccaaggaattggctgtgaaggtgaagctgtctggaagctatggctatttttctgcctccgttgagtctgatttctctcagagcatttccgatgcgacggacaccacatacacttcagttcgcacccacgtcaacaagtggaggctgagcctgaaggacgatgttggggcccttcgctcgaagctgctgcctggcttcaagcaggcgctggctaccatggatgctacgcagctctttgacacgttcgggactcactatgtgagcgaggtgcttgtgggtgggcgtgcagactacgttgccaccaccaagaccagcgcgttcagctcatccaccagcatcagcgtagcggcagaagcatcattccagtccatcgcgggtggggaggtgtctccggagtccaaggtgcttgcggagacgctgagagagaacagcagcacacgcctgtacgctcttggagggagtgccctccccaacatcacagatccagccacgtacaacgcctggctggagtccattgacaccatccctgtcttctgcggattcactcaaaacagcctcaagcccatctcggagcttgctgactccgctcaacgccgggacgctctggccaaagcctcccaaagctatatcccatcatacgtgactcgtcctgcagtggttggcttggaggtcataatatcggacagcaactcggagagccctccctatggctacaccagaatagactacgacctcaaccgcaacgcaggaggcaaatacgtgttcctctgctacaagcagaagaacatttcagtgggaggggatgccgatgccatcaccgacgtccttgtcgtctacggaaatgaccgaaatccatctgtgccgtctggctacaccaagatcgacaaggacctcaactccggggcaggcggtaagtatatctacttctgctactccaaggacaagcggaagcaagaggagggactgcccattcgtgggcttcgtgttgttgggcctcacccaacctcagtggcaccttacggattctctaagatcgacatagatctgaatatgggtgcaggaggagattttatatacctttgcaaatcacgccatttggag

SEQ ID NO: 114 - protein, 478 aa, Ophioglossum pendulum
MEPNKGGAPAMKNVAKPSTKRLIPSSIAASSQPSANALTEPLPGSDAIGQSYDAFGFFANPRSIMKELFEFSPQEEIVVEGNTWLLSSDFVYTAIRDTETSTVSRRTKDDYSKELAVKVKLSGSYGYFSASVESDFSQSISDATDTTYTSVRTHVNKWRLSLKDDVGALRSKLLPGFKQALATMDATQLFDTFGTHYVSEVLVGGRADYVATTKTSAFSSSTSISVAAEASFQSIAGGEVSPESKVLAETLRENSSTRLYALGGSALPNITDPATYNAWLESIDTIPVFCGFTQNSLKPISELADSAQRRDALAKASQSYIPSYVTRPAVVGLEVIISDSNSESPPYGYTRIDYDLNRNAGGKYVFLCYKQKNISVGGDADAITDVLVVYGNDRNPSVPSGYTKIDKDLNSGAGGKYIYFCYSKDKRKQEEGLPIRGLRVVGPHPTSVAPYGFSKIDIDLNMGAGGDFIYLCKSRHLE

SEQ ID NO: 115 - DNA, 1434 bp, Ophioglossum pendulum
atggaacccaacaaaggtggtgctccagccatgaaaaatgtagccaaaccttccacaaagagactcataccgtcatccattgctgcatcatcgcaaacatctgcaaatgcattaaccgagccattgcctggctctgatgccatcggccagagctacgatgcattcgggttcttcgccaatcccagaagcatcatgaaggagttgttcgagttcagtcctcaagaggagatagtcgtggaaggaaatacctggcttctctcttcggacttcgtttacaccgcaattagagacactgagacctccacggtctcacgtcgcaccaaggacgactactccaaggaattggctgtgaaggtgaagctgtctggaagctatggctatttttctgcctccgttgagtctgatttctctcagagcatttccgatgcgacggacaccacatacacttcagttcgcacccacgtcaacaagtggaggctgagcctgaaggacgatgttggggcccttcgctcgaagctgctgcctggcttcaagcaggcgctggctaccatggatgctacgcagctctttgacacgttcgggactcactatgtgagcgaggtgcttgtgggtgggcgtgcagactacgttgccaccaccaagaccagcgcgttcagctcatccaccagcatcagcgtagcggcagaagcatcattccagtccatcgcgggtggggaggtgtctccggagtccaaggtgcttgcggagacgctgagagagaacagcagcacacgcctgtacgctcttggagggagtgccctccccaacatcacagatccagccacgtacaacgcctggctggagtccattgacaccatccctgtcttctgcggattcactcaaaacagcctcaagcccatctcggagcttgctgactccgctcaacgccgggacgctctggccaaagcctcccaaagctatatcccatcatacgtgactcgtcctgcagtggttggcttggaggtcataatatcggacagcaactcggagagccctccctatggctacaccagaatagactacgacctcaaccgcaacgcaggaggcaaatacgtgttcctctgctacaagcagaagaacatttcagtgggaggggatgccgatgccatcaccgacgtccttgtcgtctacggaaatgaccgaaatccatctgtgccgtctggctacaccaagatcgacaaggacctcaactccggggcaggcggtaagtatatctacttctgctactccaaggacaagcggaagcaagaggagggactgcccattcgtgggcttcgtgttgttgggcctcacccaacctcagtggcaccttacggattctctaagatcgacatagatctgaatatgggtgcaggaggagattttatatacctttgcaaatcacgccatttggag

SEQ ID NO: 116 - protein, 478 aa, Ophioglossum pendulum
MEPNKGGAPAMKNVAKPSTKRLIPSSIAASSQTSANALTEPLPGSDAIGQSYDAFGFFANPRSIMKELFEFSPQEEIVVEGNTWLLSSDFVYTAIRDTETSTVSRRTKDDYSKELAVKVKLSGSYGYFSASVESDFSQSISDATDTTYTSVRTHVNKWRLSLKDDVGALRSKLLPGFKQALATMDATQLFDTFGTHYVSEVLVGGRADYVATTKTSAFSSSTSISVAAEASFQSIAGGEVSPESKVLAETLRENSSTRLYALGGSALPNITDPATYNAWLESIDTIPVFCGFTQNSLKPISELADSAQRRDALAKASQSYIPSYVTRPAVVGLEVIISDSNSESPPYGYTRIDYDLNRNAGGKYVFLCYKQKNISVGGDADAITDVLVVYGNDRNPSVPSGYTKIDKDLNSGAGGKYIYFCYSKDKRKQEEGLPIRGLRVVGPHPTSVAPYGFSKIDIDLNMGAGGDFIYLCKSRHLE

SEQ ID NO: 117 - DNA, 1434 bp, Ophioglossum pendulum
atggaacccaacaaaggtggtgctccagccatgaaaaatgtagccaaaccttccacaaagagactcataccgtcatccattgctgcatcatcgcaaacatctgcaaatgcattaaccgagccattgcctggctctgatgccatcggccagagctacgatgcgttcgggttcttcgccaatcccagaagcatcatgaaggagttgtttgagttcagtcctcaagaggagatagtcgtggaaggaaatacctggcttctctcttcggacttcgtttacaccgcaattagagacactgagacctccacggtctcacgtcgcaccaaggacgactactccaaggaattggctgtgaaggtgaagctgtctggaagctatggctttttttctgcctccgttgagtctgatttctctcagagcatttccgatgcgacggacaccacatacacttcagttcgcacccacgtcaacaagtggaggctgagcctgaaggacgatgttggggcccttcgctcgaagctgctgcctggcgtcaagcaggcgctggctaccatggatgctacgcagctctttgacacgttcgggactcactatgtgagcgaggtgcttgtgggtgggcgtgcagactacgttgccaccaccaagaccagcgcgttcagctcatccaccagcatcagcgtagcggcagaagcatcattccagtccatcgcgggtggggaggtgtctccggagtccaaggtgcttgcggagacgctgagagagaacagcagcacacgcctgtacgctcttggcgggagtgccctccccaacatcacagatccagccacgtacaacgcctggctgcagtccattgacaccatccctgtcttctgcggattcactcaaaacagcctcaagcccatctcggagcttgctgactccgctcaacgccgggacgctctggccaaagcctcccaaagctatatcccatcatacgcgactcgtcctgcagtggttggcttggaggtcataatatcggacagcaactcggagagccctccctatggctacaccagaatagactacgacctcaaccgcaacgcaggaggcaaatacgtgttcctctgctacaagcagaagaacatttcagtgggaggggatgccgatgccatcaccgacgtccttgtcgtctacggaaatgaccgaaatccatctgtgccgtctggctacaccaagatcgacaaggacctcaactccggggcaggcggtaagtatatctacttctgctactccaaggacaagcggaagcaagaggagggactgcctattcgtgggcttcgtgttgttgggcctcacccaacctcagtggcaccttacggattctctaagatcgacatagatctgaatatgggtgcaggaggagattttatatacctttgcaaatcacgccatttggag

SEQ ID NO: 118 - protein, 478 aa, Ophioglossum pendulum
MEPNKGGAPAMKNVAKPSTKRLIPSSIAASSQTSANALTEPLPGSDAIGQSYDAFGFFANPRSIMKELFEFSPQEEIVVEGNTWLLSSDFVYTAIRDTETSTVSRRTKDDYSKELAVKVKLSGSYGFFSASVESDFSQSISDATDTTYTSVRTHVNKWRLSLKDDVGALRSKLLPGVKQALATMDATQLFDTFGTHYVSEVLVGGRADYVATTKTSAFSSSTSISVAAEASFQSIAGGEVSPESKVLAETLRENSSTRLYALGGSALPNITDPATYNAWLQSIDTIPVFCGFTQNSLKPISELADSAQRRDALAKASQSYIPSYATRPAVVGLEVIISDSNSESPPYGYTRIDYDLNRNAGGKYVFLCYKQKNISVGGDADAITDVLVVYGNDRNPSVPSGYTKIDKDLNSGAGGKYIYFCYSKDKRKQEEGLPIRGLRVVGPHPTSVAPYGFSKIDIDLNMGAGGDFIYLCKSRHLE

SEQ ID NO: 119 - DNA, 1434 bp, Ophioglossum pendulum
atggaacccaacaaaggtggtgctccagccatgaaaaatgtagccaaaccttccacaaagagactcataccgtcatccattgctgcatcatcgcaaacatctgcaaatgcattaaccgagccattgcctggctctgatgccatcggccagagctacgatgcattcgggttcttcgccaatcccagaagcatcatgaaggagttgttcgagttcagtcctcaagaggagatagtcgtggaaggaaatacctggcttctctcttcggacttcgtttacaccgcaattagagacactgagacctccacggtctcacgtcgcaccaaggacgactactccaaggaattggctgtgaaggtgaagctgtctggaagctatggctatttttctgcctccgttgagtctgatttctctcagagcatttccgatgcgacggacaccacatacacttcagttcgcacccacgtcaacaagtggaggctgagcctgaaggacgatgttggggcccttcgctcgaagctgctgcctggcgtcaagcaggcgctggctaccatggatgctacgcagctctttgacacgttcgggactcactatgtgagcgaggtgcttgtgggtgggcgtgcagactacgttgccaccaccaagaccagcgcgttcagctcatccaccagcatcagcgtagcggcagaagcatcattccagtccatcgcgggtggggaggtgtctccggagtccaaggtgcttgcggagacgctgagagagaacagcagcacacgcctgtacgctcttggcgggagtgccctccccaacatcacagatccagccacgtacaacgcctggctgcagtccattgacaccatccctgtcttctgcggattcactcaaaacagcctcaagcccatctcggagcttgctgactccgctcaacgccgggacgctctggccaaagcctcccaaagctatatcccatcatacgtgactcgtcctgcagtggttggcttggaggtcataatatcggacagcaactcggagagccctccctatggctacaccagaatagactacgacctcaaccgcaacgcaggaggcaaatacgtgttcctctgctacaagcagaagaacatttcagtgggaggggatgccgatgccatcaccgacgtccttgtcgtctacggaaatgaccgaaatccatctgtgccgtctggctacaccaagatcgacaaggacctcaactccggggcaggcggtaagtatatctacttctgctactccaaggacaagcggaagcaagaggagggactgcctattcgtgggcttcgtgttgttgggcctcacccaacctcagtggcaccttacggattctctaagatcgacatagatctgaatatgggtgcaggaggagattttatatacctttgcaaatcacgccatttggag

SEQ ID NO: 120 - protein, 478 aa, Ophioglossum pendulum
MEPNKGGAPAMKNVAKPSTKRLIPSSIAASSQTSANALTEPLPGSDAIGQSYDAFGFFANPRSIMKELFEFSPQEEIVVEGNTWLLSSDFVYTAIRDTETSTVSRRTKDDYSKELAVKVKLSGSYGYFSASVESDFSQSISDATDTTYTSVRTHVNKWRLSLKDDVGALRSKLLPGVKQALATMDATQLFDTFGTHYVSEVLVGGRADYVATTKTSAFSSSTSISVAAEASFQSIAGGEVSPESKVLAETLRENSSTRLYALGGSALPNITDPATYNAWLQSIDTIPVFCGFTQNSLKPISELADSAQRRDALAKASQSYIPSYVTRPAVVGLEVIISDSNSESPPYGYTRIDYDLNRNAGGKYVFLCYKQKNISVGGDADAITDVLVVYGNDRNPSVPSGYTKIDKDLNSGAGGKYIYFCYSKDKRKQEEGLPIRGLRVVGPHPTSVAPYGFSKIDIDLNMGAGGDFIYLCKSRHLE

SEQ ID NO: 121 - DNA, 1434 bp, Ophioglossum pendulum
atggaacccaagacaggtggtgctccagccatgaaaaatgtagccaaaccttccacaaagacactcataccgtcatccattgctgcatcatcgcaaacagctgcaaatgcattaaccgagccattgcctggctctgatgccatcggccagagctacgatgcattcgggttcttcgccaatcccagaagcatcatgaaggagttgttcgagttcagtcctcaagaggagatagtcgtggaaggaaatacctggcttctctcttcggacttcgtttacaccgcaattagagacactgagacctccacggtctcacgtcgcaccaaggacgactactccaaggaattggctgtgaaggtgaagctgtctggaagctatggctttttttctgcctccgttgagtctgatttctctcagagcatttccgatgtgacggacaccacatacacttcagttcgcacccacgtcaacaagtggaggctgagcctgaaggacgatgttggggcccttcgctcgaagctgctgcctggcttcaagcaggcgctggctaccatggatgctacgcagctctttgacacgttcgggactcactatgtgagcgaggtgcttgtgggtgggcgtgcagactacgttgccaccaccaagaccagcgcgttcagctcatccaccagcatcagcgtagcggcagaagcatcattccagtccatcgcgggtggggaggtgtctccggagtccaaggtgcttgcggagatgctgagagagaacagcagcacacgcctgtacgctcttggcgggagtgccctccccaacatcacagatccagccacgtacaacgcctggctggagtccattgacaccatccctgtcttctgcggattcactcaaaacagcctcaagcccatctcggagcttgctgactccgctcaacgccgggacgctctggccaaagcctcccaaagctatatcccatcatacgtgactcgtcctgcagtggttggcttggaggtcataatatcggacagcaactcggagagccctccctatggctacaccagaatagactacgacctcaaccgcaacgcaggaggcaaatacgtgttcctctgctacaagcagaagaacatttcagtgggaggggatgccgatgccatcaccgacgtccttgtcgtctacggaaatgaccgaaatccatctgtgccgtctggctacaccaagatcgacaaggacctcaactccggggcaggcggtaagtatatctacttctgctactccaaggacaagcggaagcaagaggagggactgcccattcgtgggcttcgtgttgttgggcctcacccaacctcagtggcaccttacggattctctaagatcgacatagatctgaatatgggtgcaggaggagattttatatacctttgcaaatcacgccatttggag

SEQ ID NO: 122 - protein, 478 aa, Ophioglossum pendulum
MEPKTGGAPAMKNVAKPSTKTLIPSSIAASSQTAANALTEPLPGSDAIGQSYDAFGFFANPRSIMKELFEFSPQEEIVVEGNTWLLSSDFVYTAIRDTETSTVSRRTKDDYSKELAVKVKLSGSYGFFSASVESDFSQSISDVTDTTYTSVRTHVNKWRLSLKDDVGALRSKLLPGFKQALATMDATQLFDTFGTHYVSEVLVGGRADYVATTKTSAFSSSTSISVAAEASFQSIAGGEVSPESKVLAEMLRENSSTRLYALGGSALPNITDPATYNAWLESIDTIPVFCGFTQNSLKPISELADSAQRRDALAKASQSYIPSYVTRPAVVGLEVIISDSNSESPPYGYTRIDYDLNRNAGGKYVFLCYKQKNISVGGDADAITDVLVVYGNDRNPSVPSGYTKIDKDLNSGAGGKYIYFCYSKDKRKQEEGLPIRGLRVVGPHPTSVAPYGFSKIDIDLNMGAGGDFIYLCKSRHLE

SEQ ID NO: 123 - DNA, 1433 bp, Ophioglossum pendulum
atggaacccaacaaaggtggtgctccagccatgaaaaatgtagccaaaccttccacaaagagactcataccgtcatccattgctgcatcatcgcaaacatctgcaaatgcattaaccgagccattgcctggctctgatgccatcggccagagctacgatgcattcgggttcttcgccaatcccagaagcatcatgaaggagttgtttgagttcagtcctcaagaggagatagtcgtggaaggaaatacctggcttctctcttcggacttcgtttacaccgcaattagagacactgagacctccacggtctcacgtcgcaccaaggacgactactccaaggaattggctgtgaaggtgaagctgtctggaagctatggctttttttctgcctccgttgagtctgatttctctcagagcatttccgatgtgacggacaccacatacacttcagttcgcacccacgtcaacaagtggaggctgagcctgaaggacgatgttggggcccttcgctcgaagctgctgcctggcttcaagcaggcgctggctaccatggatgctacgcagctctttgacacgttcgggactcactatgtgagcgaggtgcttgtgggtgggcgtgcagactacgttgccaccaccaagaccagcgcgttcagctcatccaccagcatcagcgtagcggcagaagcatcattccagtccatcgcgggtggggaggtgtctccggagtccaaggagcttgcggagacgctgagagagaacagcagcacacgcctgtacgctcttggcgggagtgccctccccaacatcacagatccagccacgtacaacgcctggctggagtccattgacaccatccctgtcttctgcggattcactcaaaacagcctcaagcccatctcggagcttgctgactccgctcaacgccgggacgctctggccaaagcctcccaaagctatatcccatcatacgtgactcgtcctgcagtggttggcttggaggtcataatatcggacagcaactcggagagccctccctatggctacaccagaatagactacgacctcaaccgcaacgcaggaggcaaatacgtgttcctctgctacaagcagaagaacatttcagtgggaggggatgccgatgccatcaccgacgtccttgtcgtctacggaaatgaccgaaatccatctgtgccgtctggctacaccaagatcgacaaggacctcaactccggggcaggcggtaagtatatctacttctgctactccaaggacaagcggaagcaagaggagggactgcccattcgtgggcttcgtgttgttgggcctcacccaacctcagtggcaccttacggattctctaagatcgacatagatctgaatatgggtgcaggaggagattttatatacctttgcaaatcacgccatttgag

SEQ ID NO: 124 - protein, 478 aa, Ophioglossum pendulum
MEPNKGGAPAMKNVAKPSTKRLIPSSIAASSQTSANALTEPLPGSDAIGQSYDAFGFFANPRSIMKELFEFSPQEEIVVEGNTWLLSSDFVYTAIRDTETSTVSRRTKDDYSKELAVKVKLSGSYGFFSASVESDFSQSISDVTDTTYTSVRTHVNKWRLSLKDDVGALRSKLLPGFKQALATMDATQLFDTFGTHYVSEVLVGGRADYVATTKTSAFSSSTSISVAAEASFQSIAGGEVSPESKELAETLRENSSTRLYALGGSALPNITDPATYNAWLESIDTIPVFCGFTQNSLKPISELADSAQRRDALAKASQSYIPSYVTRPAVVGLEVIISDSNSESPPYGYTRIDYDLNRNAGGKYVFLCYKQKNISVGGDADAITDVLVVYGNDRNPSVPSGYTKIDKDLNSGAGGKYIYFCYSKDKRKQEEGLPIRGLRVVGPHPTSVAPYGFSKIDIDLNMGAGGDFIYLCKSRHLS

SEQ ID NO: 125 - DNA, 1434 bp, Ophioglossum pendulum
atggaacccaacaaaggtggtgctccagccatgaaaaatgtagccaaaccttccacaaagagactcataccgtcatccattgctgcatcatcgcaaacatctgcaaatgcattaaccgagccattgcctggctctgatgccatcggccagagctacgatgcgttcgggttcttcgccaatcccagaagcatcatgaaggagttgtttgagttcagtcctcaagaggagatagtcgtggaaggaaatacctggcttctctcttcggacttcgtttacaccgcaattagagacactgagacctccacggtctcacgtcgcaccaaggacgactactccaaggaattggctgtgaaggtgaagctgtctggaagctatggctttttttctgcctccgttgagtctgatttctctcagagcatttccgatgtgacggacaccacatacacttcagttcgcacccacgtcaacaagtggaggctgagcctgaaggacgatgttggggcccttcgctcgaagctgctgcctggcttcaagcaggcgctggctaccatggatgctacgcagctctttgacacgttcgggactcactatgtgagcgaggtgcttgtgggtgggcgtgcagactacgttgccaccaccaagaccagcgcgttcagctcatcccccagcatcagcgtagcggcagaagcatcattccagtccatcgcgggtggggaggtgtctccggagtccaaggtgcttgcggagacgctgagagagaacagcagcacacgcctgtacgctcttggcgggagtgccctccccaacatcacagatccagccacgtacaacgcctggctgcagtccattgacaccatccctgtcttctgcggattcactcaaaacagcctcaagcccatctcggagcttgctgactccgctcaacgccgggacgctctggccaaagcctcccaaagctatatcccatcatacgtgactcgtcctgcagtggttggcttggaggtcataatatcggacagcaactcggagagccctccctatggctacaccagaatagactacgacctcaaccgcaacgcaggaggcaaatacgtgttcctctgctacaagcagaagaacatttcagtgggaggggatgccgatgccatcaccgacgtccttgtcgtctacggaaatgaccgaaatccatctgtgccgtctggctacaccaagatcgacaaggacctcaactccggggcaggcggtaagtatatctacttctgctactccaaggacaagcggaagcaagaggagggactgcctattcgtgggcttcgtgttgttgggcctcacccaacctcagtggcaccttacggattctctaagatcgacatagatctgaatatgggtgcaggaggagattttatatacctttgcaaatcacgccatttggag

SEQ ID NO: 126 - protein, 478 aa, Ophioglossum pendulum
MEPNKGGAPAMKNVAKPSTKRLIPSSIAASSQTSANALTEPLPGSDAIGQSYDAFGFFANPRSIMKELFEFSPQEEIVVEGNTWLLSSDFVYTAIRDTETSTVSRRTKDDYSKELAVKVKLSGSYGFFSASVESDFSQSISDVTDTTYTSVRTHVNKWRLSLKDDVGALRSKLLPGFKQALATMDATQLFDTFGTHYVSEVLVGGRADYVATTKTSAFSSSPSISVAAEASFQSIAGGEVSPESKVLAETLRENSSTRLYALGGSALPNITDPATYNAWLQSIDTIPVFCGFTQNSLKPISELADSAQRRDALAKASQSYIPSYVTRPAVVGLEVIISDSNSESPPYGYTRIDYDLNRNAGGKYVFLCYKQKNISVGGDADAITDVLVVYGNDRNPSVPSGYTKIDKDLNSGAGGKYIYFCYSKDKRKQEEGLPIRGLRVVGPHPTSVAPYGFSKIDIDLNMGAGGDFIYLCKSRHLE

SEQ ID NO: 127 - DNA, 1434 bp, Ophioglossum pendulum
atggaacccaacaaaggtggtgctccagccatgaaaaatgtagccaaaccttccacaaagagactcataccgtcatccattgctgcatcatcgcaagcatctgcaaatgcattaaccgagccattgcctggctctgatgccatcggccagagctacgatgcattcgggttcttcgccaatcccagaagcatcatgaaggagttgtttgagttcagtcctcaagaggagatagtcgtggaaggaaatacctggcttctctcttcggacttcgtttacaccgcaattagagacactgagacctccacggtctcacgtcgcaccaaggacgactactccaaggaattggctgtgaaggtgaagctgtctggaagctatggctatttttctgcctccgttgagtctgatttctctcagagcatttccgatgcgacggacaccacatacacttcagttcgcacccacgtcaacaagtggaggctgagcctgaaggacgatgttggggcccttcgctcgaagctgctgcctggcttcaagcaggcgctggctaccatggatgctacgcagctctttgacacgttcgggactcactatgtgagcgaggtgcttgtgggtgggcgtgcagactacgttgccaccaccaagaccagcgcgttcagctcatccaccagcatcagcgtagcggcagaagcatcattccagtccatcgcgggtggggaggtgtctcctgcgtccaaggtgcttgcggagatgctgagagagaacagcagcacacgcctgtacgctcttggcgtgagtgccctccccaacatcacagatccagccacgtacaacgcctggctggagtccattgacaccatccctgtcttctgcggattcactcaaaacagcctcaagcccatctcggagcttgctgactccgctcaacgccgggtcgctctggccaaagcctcccaaagctatatcccatcatacgtgactcgtcctgcagtggttggcttggaggtcataatatcggacagcaactcggagagccctccctatggctacaccagaatagactacgacctcaaccgcaacgcaggaggtaaatacgtgttcctctgctacaagcagaagaacatttcagtgggaggggatgccgatgccatcaccgacgtccttgtcgtctacggaaatgaccgaaatccatctgttccgtctggctacaccaagatcgacaaggacctcaactccggggcaggcggtaagtatatctacttctgttactccaaggacaagcggaagcaagaggagggaccgcccattcgtgggcttcgtgttgttgggcctcacccaacctcagtggcaccttacggattctctaagatcgacatagatctgaatatgggtgcaggaggagattttatatacctttgcaaatcacgccatttggag

SEQ ID NO: 128 - protein, 478 aa, Ophioglossum pendulum
MEPNKGGAPAMKNVAKPSTKRLIPSSIAASSQASANALTEPLPGSDAIGQSYDAFGFFANPRSIMKELFEFSPQEEIVVEGNTWLLSSDFVYTAIRDTETSTVSRRTKDDYSKELAVKVKLSGSYGYFSASVESDFSQSISDATDTTYTSVRTHVNKWRLSLKDDVGALRSKLLPGFKQALATMDATQLFDTFGTHYVSEVLVGGRADYVATTKTSAFSSSTSISVAAEASFQSIAGGEVSPASKVLAEMLRENSSTRLYALGVSALPNITDPATYNAWLESIDTIPVFCGFTQNSLKPISELADSAQRRVALAKASQSYIPSYVTRPAVVGLEVIISDSNSESPPYGYTRIDYDLNRNAGGKYVFLCYKQKNISVGGDADAITDVLVVYGNDRNPSVPSGYTKIDKDLNSGAGGKYIYFCYSKDKRKQEEGPPIRGLRVVGPHPTSVAPYGFSKIDIDLNMGAGGDFIYLCKSRHLE

SEQ ID NO: 129 - DNA, 1434 bp, Ophioglossum pendulum
atggaacccaacaaaggtggtgctccagccatgaaaaatgtagccaaaccttccacaaagagactcataccgtcatccattgctgcatcatcgcaaacatctgcaaatgcattaaccgagccattgcctggctctgattccatcggccagagctacgatgcgttcgggttcttcgccaatcccagaagcatcatgaaggagttgttcgagttcagtcctcaagaggagatagtcgtggaaggaaatacctggcttctctcttcggacttcgtttacaccgcaattagagacactgagacctccacggtctcacgtcgcaccaaggacgactactccaaggaattggctgtgaaggtgaagctgtctggaagctatggctttttttctgcctccgttgagtctgatttctctcagagcatttccgatgtgacggacaccacatacacttcagttcgcacccacgtcaacaagtggaggctgagcctgaaggacgatgttggggcccttcgctcgaagctgctgcctggcttcaagcaggcgctggctaccatggatgctacgcagctctttgacacgttcgggactcactatgtgagcgaggtgcttgtgggtgggcgtgcagactacgttgccaccaccaagaccagcgcgttcagctcatccaccagcatcagcgtagcggcagaagcatcattccagtccatcgcgggtggggaggtgtctccggagtccaaggtgcttgcggagacgctgagagagaacagcagcacacgcctgtacgctcttggcgggagtgccctccccaacatcacagatccagccacgtacaacgcctggctgcagtccattgacaccatccctgtcttctgcggattcactcaaaacagcctcaagcccatctcggagcttgctgactccgctcaacgccgggacgctctggccaaagcctcccaaagctatatcccatcatacgtgactcgtcctgcagtggttggcttggaggtcataatatcggacagcaactcggagagccctccctatggctacaccagaatagactacgacctcaaccgcaacgcaggaggcaaatacgtgttcctctgctacaagcagaagaacatttcagtgggaggggatgccgatgccatcaccgacgtccttgtcgtctacggaaatgaccgaaatccatctgtgccgtctggctacaccaagatcgacaaggacctcaactccggggcaggcggtaagtatatctacttctgctactccaaggacaagcggaagcaagaggagggactgcctattcgtgggcttcgtgttgttgggcctcactcaacctcagtggcaccttacggattctctaagatcgacatagatctgaatatgggtgcaggaggagattttatatacctttgcaaatcacgccatttggag

SEQ ID NO: 130 - protein, 478 aa, Ophioglossum pendulum
MEPNKGGAPAMKNVAKPSTKRLIPSSIAASSQTSANALTEPLPGSDSIGQSYDAFGFFANPRSIMKELFEFSPQEEIVVEGNTWLLSSDFVYTAIRDTETSTVSRRTKDDYSKELAVKVKLSGSYGFFSASVESDFSQSISDVTDTTYTSVRTHVNKWRLSLKDDVGALRSKLLPGFKQALATMDATQLFDTFGTHYVSEVLVGGRADYVATTKTSAFSSSTSISVAAEASFQSIAGGEVSPESKVLAETLRENSSTRLYALGGSALPNITDPATYNAWLQSIDTIPVFCGFTQNSLKPISELADSAQRRDALAKASQSYIPSYVTRPAVVGLEVIISDSNSESPPYGYTRIDYDLNRNAGGKYVFLCYKQKNISVGGDADAITDVLVVYGNDRNPSVPSGYTKIDKDLNSGAGGKYIYFCYSKDKRKQEEGLPIRGLRVVGPHSTSVAPYGFSKIDIDLNMGAGGDFIYLCKSRHLE

SEQ ID NO: 131 - DNA, 1434 bp, Ophioglossum pendulum
atggaacccaacaaaggtggtgctccagccatgaaaaatgtagccaaaccttccacaaagagactcataccgtcatccattgctgcatcatcgcaaacatctgcaaatgcattaaccgagccattgcctggctctgattccatcggccagagctacgatgcgttcgggttcttcgccaatcccagaagcatcatgaaggagttgttcgagttcagtcctcaagaggagatagtcgtggaaggaaatacctggcttctctcttcggacttcgtttacaccgcaattagagacactgagacctccacggtctcacgtcgcaccaaggacgactactccaaggaattggctgtgaaggtgaagctgtctggaagctatggctttttttctgcctccgttgagtctgatttctctcagagcatttccgatgtgacggacaccacatacacttcagttcgcacccacgtcaacaagtggaggctgagcctgaaggacgatgttggggcccttcgctcgaagctgctgcctggcttcaagcaggcgctggctaccatggatgctacgcagctctttgacacgttcgggactcactatgtgagcgaggtgcttgtgggtgggcgtgcagactacgttgccaccaccaagaccagcgcgttcagctcatccaccagcatcagcgtagcggcagaagcatcattccagtccatcgcgggtggggaggtgtctccggagtccaaggtgcttgcggagacgctgagagagaacagcagcacacgcctgtacgctcttggcgggagtgccctccccaacatcacagatccagccacgtacaacgcctggctgcagtccattgacaccatccctgtcttctgcggattcactcaaaacagcctcaagcccatctcggagcttgctgactccgctcaacgccgggacgctctggccaaagcctcccaaagctatatcccatcatacgcgactcgtcctgcagtggttggcttggaggtcataatatcggacagcaactcggagagccctccctatggctacaccagaatagactacgacctcaaccgcaacgcaggaggcaaatacgtgttcctctgctacaagcagaagaacatttcagtgggaggggatgccgatgccatcaccgacgtccttgtcgtctacggaaatgaccgaaatccatctgtgccgtctggctacaccaagatcgacaaggacctcaactccggggcaggcggtaagtatatctacttctgctactccaaggacaagcggaagcaagaggagggactgcctattcgtgggcttcgtgttgttgggcctcacccaacctcagtggcaccttacggattctctaagatcgacatagatctgaatatgggtgcaggaggagattttatatacctttgcaaatcacgccatttggag

SEQ ID NO: 132 - protein, 478 aa, Ophioglossum pendulum
MEPNKGGAPAMKNVAKPSTKRLIPSSIAASSQTSANALTEPLPGSDSIGQSYDAFGFFANPRSIMKELFEFSPQEEIVVEGNTWLLSSDFVYTAIRDTETSTVSRRTKDDYSKELAVKVKLSGSYGFFSASVESDFSQSISDVTDTTYTSVRTHVNKWRLSLKDDVGALRSKLLPGFKQALATMDATQLFDTFGTHYVSEVLVGGRADYVATTKTSAFSSSTSISVAAEASFQSIAGGEVSPESKVLAETLRENSSTRLYALGGSALPNITDPATYNAWLQSIDTIPVFCGFTQNSLKPISELADSAQRRDALAKASQSYIPSYATRPAVVGLEVIISDSNSESPPYGYTRIDYDLNRNAGGKYVFLCYKQKNISVGGDADAITDVLVVYGNDRNPSVPSGYTKIDKDLNSGAGGKYIYFCYSKDKRKQEEGLPIRGLRVVGPHPTSVAPYGFSKIDIDLNMGAGGDFIYLCKSRHLE

SEQ ID NO: 133 - DNA, 1434 bp, Ophioglossum pendulum
atggaacccaacaaaggtggtgctccagccatgaaaaatgtagccaaaccttccacaaagagactcataccgtcatccattgctgcatcatcgcaaacatctgcaaatgcattaaccgagccattgcctggctctgatgccatcggccagagctacgatgcgttcgggttcttcgccaatcccagaagcatcatgaaggagttgtttgagttcagtcctcaagaggagatagtcgtggaaggaaatacctggcttctctcttcggacttcgtttacaccgcaattagagacactgagacctccacggtctcacgtcgcaccaaggacgactactccaaggaattggctgtgaaggtgaagctgtctggaagctatggctttttttctgcctccgttgagtctgatttctctcagagcatttccgatgtgacggacaccacatacacttcagttcgcacccacgtcaacaagtggaggctgagcctgaaggacgatgttggggcccttcgctcgaagctgctgcctggcttcaagcaggcgctggctaccatggatgctacgcagctctttgacacgttcgggactcactatgtgagcgaggtgcttgtgggtgggcgtgcagactacgttgccaccaccaagaccagcgcgttcagctcatccaccagcatcagcgtagcggcagaagcatcattccagtccatcgcgggtggggaggtgtctccggagtccaaggtgcttgcggagacgctgagagagaacagcagcacacgcctgtacgctcttggcgggagtgccctccccaacatcacagatccagccacgtacaacgcctggctgaagtccattgacaccatccctgtcttctgcggattcactcaaaacagcctcaagcccatctcggagcttgctgactccgctcaacgccgggacgctctggccaaagcctcccaaagctatatcccatcatacgtgactcgtcctgcagtggttggcttggaggtcataatatcggacagcaactcggagagccctccctatggctacaccagaatagactacgacctcaaccgcaacgcaggaggcaaatacgtgttcctctgctacaagcagaagtacatttcagtgggaggggatgccgatgccatcaccgacgtccttgtcgtctacggaaatgaccgaaatccatctgtgccgtctggctacaccaagatcgacaaggacctcaactccggggcaggcggtaagtatatctacatctgctactccaaggacaagtggaagcaagaggagggactgcccattcgtgggcttcgtgttgttgggcctgacgccaactcagtggcaccctacggattctctaagatcgacatagatctgaatatggatgcaggaggagattttatatacctctgcaaatcacgccatttggag

SEQ ID NO: 134 - protein, 478 aa, Ophioglossum pendulum
MEPNKGGAPAMKNVAKPSTKRLIPSSIAASSQTSANALTEPLPGSDAIGQSYDAFGFFANPRSIMKELFEFSPQEEIVVEGNTWLLSSDFVYTAIRDTETSTVSRRTKDDYSKELAVKVKLSGSYGFFSASVESDFSQSISDVTDTTYTSVRTHVNKWRLSLKDDVGALRSKLLPGFKQALATMDATQLFDTFGTHYVSEVLVGGRADYVATTKTSAFSSSTSISVAAEASFQSIAGGEVSPESKVLAETLRENSSTRLYALGGSALPNITDPATYNAWLKSIDTIPVFCGFTQNSLKPISELADSAQRRDALAKASQSYIPSYVTRPAVVGLEVIISDSNSESPPYGYTRIDYDLNRNAGGKYVFLCYKQKYISVGGDADAITDVLVVYGNDRNPSVPSGYTKIDKDLNSGAGGKYIYICYSKDKWKQEEGLPIRGLRVVGPDANSVAPYGFSKIDIDLNMDAGGDFIYLCKSRHLE

SEQ ID NO: 135 - DNA, 1434 bp, Ophioglossum pendulum
atggaacccaacaaaggtggtgctccagccatgaaaaatgtagccaaaccttccacaaagacactcataccgtcatccattgctgcatcatcgcaaacagctgcaaatgcattaaccgagccattgcctggctctgatgccatcggccagagctacgatgcattcgggttctttgccaatcccagaagcatcatgaaggagttgtttgagttcagtcctcaagaggagatagtcgtggaaggaaatacctggcttctctcttcggacttcgtttacaccgcaattagagacagtgaggccttcacgctctcacatcgcaccaaggacgactactccaaggaattggctctgaaggtgaagctgtctggaagctatggctttttttctgcctccgttgagtctgatttctctcagagcatttccgatgtgacggacaccacatacacttcagttcgcacccacgtcaacaagtggaggctgagcctgaaggacgatgttggggcccttcgctcgaagctgctgcctggcttcaagcaggcgctggctaccatggatgctacgcagctctttgacacgttcgggactcactatgtgagcgaggtgcttgtgggtgggcgtgcagactacgttgccaccaccaagaccagcgcgttcagctcatccaccagcatcagcgtagcggcagaagcatcattccagtccatcgcgggtggggaggtgtctccggagtccaaggtgcttgcggagatgctgagagagaacagcagcacacgcctgtacgctcttggcgggagtgccctccccaacatcacagatccagccacgtacaacgcctggctggagtccattgacaccatccctgtcttctgcggattcactcaaaacagcctcaagcccatctcggagcttgctgactccgctcaacgccgggacgctctggccaaagcctcccaaagctatatcccatcatacgtgactcgtcctgcagtggttggcttggaggtcataatatcggacagcaactcagagagccctccctatggctacaccagaatagactacgacctcaaccgcaacgcaggaggcaaatacgtgttcctctgctacaagcagaagaacatttcagtgggaggggatgccgatgccatcaccgacgtccttgtcgtctacggaaatgaccgaaatccatctgtgccgtctggctacaccaagatctacaaggacctcaactccggggcaggcggtaagtatatctacttctgctactccaaggacaagcggaagcaagaggagggactgcccattcgtgggcttcgtgttgttgggcctcacccaacctcagtggcaccttacggattctctaagatcgacatagatctgaatatgggtgcaggaggagattttatatacctttgcaaatcacgccatttggag

SEQ ID NO: 136 - protein, 478 aa, Ophioglossum pendulum
MEPNKGGAPAMKNVAKPSTKTLIPSSIAASSQTAANALTEPLPGSDAIGQSYDAFGFFANPRSIMKELFEFSPQEEIVVEGNTWLLSSDFVYTAIRDSEAFTLSHRTKDDYSKELALKVKLSGSYGFFSASVESDFSQSISDVTDTTYTSVRTHVNKWRLSLKDDVGALRSKLLPGFKQALATMDATQLFDTFGTHYVSEVLVGGRADYVATTKTSAFSSSTSISVAAEASFQSIAGGEVSPESKVLAEMLRENSSTRLYALGGSALPNITDPATYNAWLESIDTIPVFCGFTQNSLKPISELADSAQRRDALAKASQSYIPSYVTRPAVVGLEVIISDSNSESPPYGYTRIDYDLNRNAGGKYVFLCYKQKNISVGGDADAITDVLVVYGNDRNPSVPSGYTKIYKDLNSGAGGKYIYFCYSKDKRKQEEGLPIRGLRVVGPHPTSVAPYGFSKIDIDLNMGAGGDFIYLCKSRHLE

SEQ ID NO: 137 - DNA, 1434 bp, Ophioglossum pendulum
atggaacccaagacaggtggtgctccagccatgaaaaatgtagccaaaccttccacaaagagactcataccgtcatccattgctgcatcatcgcaaacatctgcaaatgcattaaccgagccattgcctggctctgatgccatcggccagagctacgatgcattcgggttcttcgccaatcccagaagcatcatgaaggagttgttcgagttcagtcctcaagaggagatagtcgtggaaggaaatacctggcttctctcttcggacttcgtttacaccgcaattagagacactgagacctccacggtctcacgtcgcaccaaggacgactactccaaggaattggctgtgaaggtgaagctgtctggaagctatggctatttttctgcctccgttgagtctgatttctctcagagcatttccgatgcgacggacaccacatacacttcagttcgcacccacgtcaacaagtggaggctgagcctgaaggacgatgttggggcccttcgctcgaagctgctgcctggcgtcaagcaggcgctggctaccatggatgctacgcagctctttgacacgttcgggactcactatgtgagcgaggtgcttgtgggtgggcgtgcagactacgttgccaccaccaagaccagcgcgttcagctcatccaccaacatcagtgcagtggcagaagcatcattcaagtccatcgcgggtggggaagtgtctccggagtacaaggagcttgtgcagacgctgagagagaacagcagcacacgcctgtacgctcttggcgggagtgccctctccaacatcacagattcagccacgtacaacgcctggcttaagtccattgacaccatccctgtcttctgcggattcactcaaaacagcctcaagcccatctcggagcttgctgactccgctcaacgccgggacgctctggccaaagcctcccaaagctatatcccatcatacgtgactcgtcctgcagtggttggcttggaggtcataatatcggacagcaactcggagagccctccctatggctacaccagaatagactacgacctcaaccgcaacgcaggaggcaaatacgtgttcctctgctacaagcagaagaacatttcagtgggaggggatgccgatgccatcaccgacgtccttgtcgtctacggaaatgaccgaaatccatctgtgccgtatggttacaccaaaatcgacaaggaccttaactgcggggcaggaggcaagtatatctacatctgctactccaaggacaagtggaggcaagaggagggactgcccattcgtgggcttcgtgttgttgggcctgacccgaactcagtggcaccttacggattctctaagatcgacatagatctgaatatgggtgcaggaggagatttcatatacctttgcaaatcacgccatttggag

SEQ ID NO: 138 - protein, 478 aa, Ophioglossum pendulum
MEPKTGGAPAMKNVAKPSTKRLIPSSIAASSQTSANALTEPLPGSDAIGQSYDAFGFFANPRSIMKELFEFSPQEEIVVEGNTWLLSSDFVYTAIRDTETSTVSRRTKDDYSKELAVKVKLSGSYGYFSASVESDFSQSISDATDTTYTSVRTHVNKWRLSLKDDVGALRSKLLPGVKQALATMDATQLFDTFGTHYVSEVLVGGRADYVATTKTSAFSSSTNISAVAEASFKSIAGGEVSPEYKELVQTLRENSSTRLYALGGSALSNITDSATYNAWLKSIDTIPVFCGFTQNSLKPISELADSAQRRDALAKASQSYIPSYVTRPAVVGLEVIISDSNSESPPYGYTRIDYDLNRNAGGKYVFLCYKQKNISVGGDADAITDVLVVYGNDRNPSVPYGYTKIDKDLNCGAGGKYIYICYSKDKWRQEEGLPIRGLRVVGPDPNSVAPYGFSKIDIDLNMGAGGDFIYLCKSRHLE

SEQ ID NO: 139 - DNA, 1434 bp, Ophioglossum pendulum
atggaacccaagacaggtggtgctccagccatgaaaaatgtagccaaaccttccacaaagagactcataccgtcatccattgctgcatcatcgcaaacatctgcaaatgcattaaccgagccattgcctggctctgatgccatcggccagagctacgatgcgttcgggttcttcgccaatcccagaagcatcatgaaggagttgtttgagttcagtcctcaagaggagatagtcgtggaaggaaatacctggcttctctcttcggacttcgtttacaccgcaattagagacactgagacctccacggtctcacgtcgcaccaaggacgactactccaaggaattggctgtgaaggtgaagctgtctggaagctatggctatttttctgcctccgttgagtctgatttctctcagagcatttccgatgcgacggacaccacatacacttcagttcgcacccacgtcaacaagtggaggctgagcctgaaggacgatgttggggcccttcgctcgaagctgctgcctggcgtcaagcaggcgctggctaccatggatgctacgcagctctttgacacgttcgggactcactatgtgagcgaggtgcttgtgggtgggcgtgcagactacgttgccaccaccaagaccagcgcgttcagctcatccaccagcatcagcgtagcggcagaagcatcattccagtccatcgcgggtggggaggtgtctccggagtccaaggtgcttgcggagatgctgagagagaacagcagcacacgcctgtacgctcttggcgggagtgccctccccaacatcaccgattcatccacgtacaacgcctggctgaagtccattgacaccatccctgtcttctgcggattcactctgaacagcctcaagcccatctcggagcttgctaactccgctcaacgccgggacgctctggcgaaagcctcccaaagctatatcccatcatacgtgactcgacctgcagtggttggcttggaggtcataatatcagacagctactgggagagccctccctatggctacaccaaaatcaactacgacctcaaccgcaacgcaggaggcaaatacgtgttcctctgctacaagcagaagaacatatcagtgggacgagatgccgataccataaccgacgtccatgtcatctacggagatggcccaaatccatctgtgccgtatggttacaccaaaatcgacaaggaccttaactgcggggcaggaggcaagtatatctacatctgctactccaaggacaagtggaggcaagaggagggactgcccattcgtgggcttcgtgttgttgggcctcacccaacctcagtggcaccttacggattctctaagatcgacatagatctgaatatgggtgcaggaggagattttatatacctttgcaaatcacgccatttggag

SEQ ID NO: 140 - protein, 478 aa, Ophioglossum pendulum
MEPKTGGAPAMKNVAKPSTKRLIPSSIAASSQTSANALTEPLPGSDAIGQSYDAFGFFANPRSIMKELFEFSPQEEIVVEGNTWLLSSDFVYTAIRDTETSTVSRRTKDDYSKELAVKVKLSGSYGYFSASVESDFSQSISDATDTTYTSVRTHVNKWRLSLKDDVGALRSKLLPGVKQALATMDATQLFDTFGTHYVSEVLVGGRADYVATTKTSAFSSSTSISVAAEASFQSIAGGEVSPESKVLAEMLRENSSTRLYALGGSALPNITDSSTYNAWLKSIDTIPVFCGFTLNSLKPISELANSAQRRDALAKASQSYIPSYVTRPAVVGLEVIISDSYWESPPYGYTKINYDLNRNAGGKYVFLCYKQKNISVGRDADTITDVHVIYGDGPNPSVPYGYTKIDKDLNCGAGGKYIYICYSKDKWRQEEGLPIRGLRVVGPHPTSVAPYGFSKIDIDLNMGAGGDFIYLCKSRHLE

SEQ ID NO: 141 - DNA, 1434 bp, Ophioglossum pendulum
atggaacccaacaaaggtggtgttccacccatgaaaaatgtagccaaaccttccactaagagactcataccgtcatcctttgctagatcgttgcaaacatctgcaaatgcatcaatcgagccattgcctggttctgatgctatcggcaatagctacgatgcattcgggtactttgccaatcccagaagcatcatgaaggaattgtttcagttcagtccacaaaaggagatagtggtggaaggaaatacctggcttctctcttctgacttcgtttacaccgcaattagagacactgagactttcacagtctcacatcgcaccaaggacgactactccacggaattggctctgaaggtgaagctgtctggaagctatggcttattttccgcctccgttcagtctgatttctctcagagcatttccgatgtgacggacaccacatacacttcagttaacaccaacgtcaacaagtggaggctgagcctgaaagacaatgttggggcccttcgcgcgaagctgctgcctgacttcaagcaggcgctggctaccatggatgctacgcccctctttgatacgtatgggactcactatgtgagcgaggtgcttgtgggtgggcgtgcagactacgttgccaccaccaagaccagcgcgttcagctcatccaccaacatcagtgcagtggcagaagcatcattcaattccatcgcgggtggggaagtgtctgcggagtacaaggagcttgtgcagacgctgagagagaacagcagcacacgcctgtacgctcttggcgggagtgccctctccaacatcacagattcagccacgtacaacgcctggcttaagtccattgacaccatccctgtcttctgcggatttactctaaacagcctcaatcccatctcagaacttgctgactccgctcaacgccgggacgctctggccaaagcctcccagagctatatcccatcatacgtgactcgtcctgcagtggttggcttggaggtcataatatcggacagctactgggagaaccctccctatggctacaccaaaatcaactacgacctcaaccgcaacgcaggaggccaatacgtgttcctgtgctacaagcagaagaacatatcagtgggaggagatgccgatgccatcaccgacgtccatgtcgtctacggagatggcccaaatccatctgtgccgtctggttacaccaagatagacaaggacctcaactgcggggcaggaggtaagtatatctacatctgctactccaaggacaagtggaagcaagaggagggactgcccattcgtgggcttcgtgttgttgggcctgacgccaactcagtggcaccctacggattctctaagatcgacatagatctgaatatggatgcaggaggagattttatatacctttgcaaatcacgccatttggag

SEQ ID NO: 142 - protein, 478 aa, Ophioglossum pendulum
MEPNKGGVPPMKNVAKPSTKRLIPSSFARSLQTSANASIEPLPGSDAIGNSYDAFGYFANPRSIMKELFQFSPQKEIVVEGNTWLLSSDFVYTAIRDTETFTVSHRTKDDYSTELALKVKLSGSYGLFSASVQSDFSQSISDVTDTTYTSVNTNVNKWRLSLKDNVGALRAKLLPDFKQALATMDATPLFDTYGTHYVSEVLVGGRADYVATTKTSAFSSSTNISAVAEASFNSIAGGEVSAEYKELVQTLRENSSTRLYALGGSALSNITDSATYNAWLKSIDTIPVFCGFTLNSLNPISELADSAQRRDALAKASQSYIPSYVTRPAVVGLEVIISDSYWENPPYGYTKINYDLNRNAGGQYVFLCYKQKNISVGGDADAITDVHVVYGDGPNPSVPSGYTKIDKDLNCGAGGKYIYICYSKDKWKQEEGLPIRGLRVVGPDANSVAPYGFSKIDIDLNMDAGGDFIYLCKSRHLE

SEQ ID NO: 143 - DNA, 1614 bp, Selaginella victoriae
atggaggactccaaagctcttacacctacaggctcagatgacaaccatagcggatctcaagccaccatcgcaggcacagaagaagtcattggggctgcgtcagactatgacaccctccctggctgtgaaatcatcggttgtggttatgatgtccttaatggacgctatgccgatgcaaccagctgccgcagcaacctcttcgacattcccaaggagtacgagacggtgaagatcgcagacaggtacttctcaaaaccagaacagatcgtctaccagtcgaacatacaggtgctggagtacacatccaaggggagcagcatcactgaatacactgaaagtgtcacgtccaagataaaggtggagggtaagtacaacttcttctccgcagaggtggaggcttctataggcatgagttcggcccaaaacctgcagaacgaatttgtccagcttcagcaaactgtgagttactacaacctccagttgccagtcaaccacaaggatttgctcaagccaagcgtcaaggatgacattgataacatcgaaaatactgccgagctgttcgacagatatggcacgcactacctcgcggggatcatcatgggtggctcggctatgtacacatcaaccacgaacaagatgagcttcgagtcaagcactgaactcgatgtggtagccaaaatgtcttacgatgagctcgtgggcagcattagtgccgaggacaggacaaaatacgagcaaaaaatcaagaacttcagagaatcgagcactactgaattgcacaacaaaggtggagaccctggtcttagtggtcaaaatttccccgcaaatgccgaggaatggaataagagcgtgatagattatctggccttctgcgagttcctctccagtgaccaaagcctgttggggatctgggagctggcctccacacctgcacgctccaagcaaatacaagactcctaccatgactactgccgcgacaaacaaaccaagtacaatgtggaccctccatacctccaggccaagatcgtcccactcaagagggtccagttcacagacacggggagccatgcccatgactacttgaccgtgtgcattcccgacgtcgactcaggttggtattaccttggtcaagtggctttcccaggaggaggtgccagaggaagcacaattgtggtgaaggagctggtggcaggcgctcttatagacgtcaagtggtggcaatgggtgtgggacgacgctggatcccacaacagcaaggacttcagcctctggtacggcaactctgccaatccggtggagtactacgtgctgggtgacttcttcagaggtggagtcgagcatacttctccagtaagcgcaccaactgcaaacgaggtggctggcatcaaggccgtgagcagcaaatgtgtggtcgaagccacagtgggagaccgaatctggcatgatgaggggacccatgcaacatatgatggtagtgtctggaagatcatccccaaaagcggatccaatgctatcgacacgagcaacatggacctttacttcatcgcttcaggatcatgggacaagcctaatcgtcccgtttacctgctcaacaaggatgctgtcgagtttgtc

SEQ ID NO: 144 - protein, 538 aa, Selaginella victoriae
MEDSKALTPTGSDDNHSGSQATIAGTEEVIGAASDYDTLPGCEIIGCGYDVLNGRYADATSCRSNLFDIPKEYETVKIADRYFSKPEQIVYQSNIQVLEYTSKGSSITEYTESVTSKIKVEGKYNFFSAEVEASIGMSSAQNLQNEFVQLQQTVSYYNLQLPVNHKDLLKPSVKDDIDNIENTAELFDRYGTHYLAGIIMGGSAMYTSTTNKMSFESSTELDVVAKMSYDELVGSISAEDRTKYEQKIKNFRESSTTELHNKGGDPGLSGQNFPANAEEWNKSVIDYLAFCEFLSSDQSLLGIWELASTPARSKQIQDSYHDYCRDKQTKYNVDPPYLQAKIVPLKRVQFTDTGSHAHDYLTVCIPDVDSGWYYLGQVAFPGGGARGSTIVVKELVAGALIDVKWWQWVWDDAGSHNSKDFSLWYGNSANPVEYYVLGDFFRGGVEHTSPVSAPTANEVAGIKAVSSKCVVEATVGDRIWHDEGTHATYDGSVWKIIPKSGSNAIDTSNMDLYFIASGSWDKPNRPVYLLNKDAVEFV

SEQ ID NO: 145 - DNA, 1356 bp, Artificial Sequence
  maize codon optimized
atggcagcccagatcgagcctcttcccggctcagacgcaatcggcctcagctacgacgtcttcggcttctacgccaacccgaagtcggtcaaccgccagctgttcgacttcgcgccgcagcaggagatcaccctggaggaccacacctggctgctgagcaccgacatcgtctacatcgcggtccgcgacaccgacatcaacaccgtctcgctccgcaccaaggacgcgtactccactgagctcgcagcatccgtcaaggtctccggcagctacggcagcttcagcgcctccgtcgagtccgacttcagccagtccatctccgacgagaccgactccacctacacgtccgtccggaccaacgtcaacaagtggaagctcagcctcaagccgaccgtcgaggagctccgctcgatgctcacgcccagcttcaaggaggcgctcgcctcgatgaactccgaggagctcttcaccacgtacggcacgcactacctcaacgaggtcctcgtcggaggcagagcggactacgtcgccaccaccaagacgtccgccttcagctccgacaccaagatctccgtcgtcgccgagtccagcttcaagagcgtcgccggcatggaagtctccgcggagtacaaggagctcatcaagaagttccaggagaactccagcacctcgctctacgctctcggaggcactgcgctcagctccatcacggacaccgcgtcctacaacgcctggttcagctccatcgacacgctgcccgtcttctgcggcttcacctacgagagcctccagccgatctgggaactcgccgagtcgccacagcgccaggagatcctccagaaggccacgaagaccttcatcccgcccgagatccgccggaacgccatcgtcgacgtcgacatcatcgtctccgacaactactgggtcaacccgccgtacggctacaccaagatcgactacgacctcaaccggaacgcgaagggcaagtacatcttcctctgctacaaccagcagaagatctcggtcgccggatcacctgccgatccgactcccatcacggcactctacgtcgcgtcaggcgatgacgaccatccgtacgtcccgctcggctacacgcgcatcaactccgacctgaacgagggcgctggcggcaagtacatctacctgtgctacacgaaggacccggcagccatcccttccgacgaggatggcctgcccatcagaggcatccgcgtgatcggcaacgagaaggtcgagaacgtcgtgacgccctacggcttcaccaagatcgacaaggacctgaacgagggtgctggcggcgactacatcttcgtctgcttcagccgccacctggac

SEQ ID NO: 146 - DNA, 1356 bp, Artificial Sequence
  maize codon optimized
atggctgcccagatcgagccgctcccgggctccgacgcgatcggcctctcctacgacgtgttcggcttctacgcgaaccccaagtcggtgaaccgccagctcttcgacttcgcgccgcagcaggagatcaccctggaggaccacacgtggctcctgagcaccgacatcgtctacatcgccgtccgcgacacggacatcaacacggtgtcgctgcggaccaaggacgcctactccaccgagctcgccgcgtccgtgaaggtctccgggtcctacgggagcttctccgccagcgtcgagtcggacttcagccagtccatctcggacgagacggactccacgtacacctcggtccggaccaacgtcaacaagtggaagctctcgctgaagcccacggtggaggagctccggtccatgctcacgccctcgttcaaggaggccctcgcgtccatgaactccgaggagctcttcacgacctacggcacgcactacctgaacgaggtgctcgtgggcggccgggccgactacgtggcgaccaccaagacgtccgccttcagctccgacaccaagatctccgtcgtcgccgagtcgagcttcaagtcggtggcgggcatggaggtcagcgccgagtacaaggagctcatcaagaagttccaggagaactcctcgacgtcgctctacgcgctcggcggcacggccctgtccagcatcaccgacacggcgtcgtacaacgcctggttcagcagcatcgacacgctgccggtcttctgcgggttcacctacgagtcgctccagccgatctgggagctcgcggagagcccgcagcgccaggagatcctccagaaggcgaccaagacgttcatcccgccggagatccgcaggaacgccatcgtcgacgtcgacatcatcgtctcggacaactactgggtgaaccccccgtacggctacaccaagatcgactacgacctcaaccggaacgcgaagggcaagtacatcttcctgtgctacaaccagcagaagatctccgtcgccggcagccccgcggaccccacgcccatcacggcgctctacgtcgcctccggagacgacgaccacccgtacgtgcccttgggctacacccggatcaactcggacctgaacgagggcgccggcggcaagtacatctacctgtgctacacgaaggacccggccgcgatcccgtcggacgaggacgggctgccgatccgcggcatccgggtcatcggcaacgagaaggtcgagaacgtcgtgacgccgtacgggttcaccaagatcgacaaggacctcaacgagggcgccggcggcgactacatcttcgtctgcttctcgcggcacctcgac

SEQ ID NO: 147 - DNA, 1356 bp, Artificial Sequence
  maize codon optimized
atggcagcacagatcgagccgcttcctgggtcggacgcgatcggcctctcctacgacgtcttcggcttctacgcgaaccccaagtccgtcaaccgccagctcttcgacttcgcgccgcagcaggagatcaccctcgaggaccacacctggctgctctcgacggacatcgtttacatcgccgtgcgcgacacggacatcaacaccgtctcgctccgcacgaaggacgcgtactcgacggagctcgcagcgtcagtcaaggtctccgggtcctacgggagcttctccgcgtctgtggagagcgacttctcccagagcatcagcgacgagacggactccacctacacctcggtccgcaccaacgtcaacaagtggaagctctcgctcaagccaaccgtcgaggagctcaggtcgatgctgacgccgtcgttcaaggaggccctggccagcatgaactcggaggagctgttcaccacgtacgggacccactacctgaacgaggtcctcgttggcggcagggcggactacgtggccaccacgaagacctcggccttcagctcggacaccaagatctccgtggtcgcggagagctccttcaagtcggtggccggcatggaggtctcggcggagtacaaggagctcatcaagaagttccaggagaactcgtccacctctctctacgccctgggagggacggcgctgtcgtcgatcaccgacaccgccagctacaacgcgtggttctcctccatcgacaccctcccggtgttctgcgggttcacgtacgagagcctgcagccgatctgggagctcgcggagagcccacaacgccaggagatcctgcagaaggcgacgaagacgttcatcccgccagagatccggcggaacgcgatcgtcgacgtcgacatcatcgtgtcggacaactactgggtcaacccgccctacggctacaccaagatcgactacgacctgaaccgcaacgcgaaagggaagtacatcttcctctgctacaaccagcagaagatctccgtcgccggatcgccagccgaccctactccgatcaccgcgctgtacgtcgcatctggggacgacgaccacccgtacgtcccactcgggtacacgcgcatcaactcggacctcaacgagggcgccggcgggaagtacatctacctctgctacaccaaggacccggccgcgattccgtcggacgaggacgggctcccgatacgcggcatccgcgtcatcgggaacgagaaggtggagaacgtcgtcacgccgtacgggttcaccaagatcgacaaggacctgaacgagggcgcaggcggcgactacatcttcgtgtgcttcagccggcacctggac

SEQ ID NO: 148 - DNA, 1356 bp, Artificial Sequence
  maize codon optimized
atggctgcacagatcgagcccttgccaggctcagacgcgatcggcctctcctacgacgtcttcggcttctacgcgaaccctaagtccgtgaaccggcagctcttcgacttcgcgccgcagcaggagatcacgctcgaggaccacacctggctcctgagcaccgacatcgtgtacatcgccgtccgcgacacggacatcaacacggtgtccctcaggaccaaggacgcctactcgacggagctggccgcctcggtgaaggtgtcgggaagctacgggagcttctcagcctccgtcgagagcgacttcagccagagcatcagcgacgagaccgactcgacgtacacctccgtccggacgaacgtgaacaagtggaagctgtccctgaagcccacggtcgaagagctgcggtccatgctcacgccgtccttcaaggaggcgctggcctccatgaactcggaggagctcttcaccacctacggcacccactacctgaacgaggtgctcgtcggaggtagggcggactacgtcgccaccaccaagacctcggccttctcgagcgacacgaagatctccgtcgtggcggagtcctcgttcaagtccgtggcgggcatggaggtgagcgcggagtacaaggagctcatcaagaagttccaggagaactcgtcaacctcgctctacgcgttgggcgggaccgcgttgtcctcgatcacggacaccgccagctacaacgcctggttctcgagcatcgacaccctccccgtcttctgcgggttcacctacgagtcgttgcagcccatctgggagctggccgagagcccgcagaggcaggagatcctgcagaaagcgaccaagacgttcatcccgcccgagatccggcgcaacgcgatcgtcgacgtggacatcatcgtctccgacaactactgggtgaacccgccctacggctacaccaagatcgactacgacctgaaccggaacgcgaagggcaagtacatcttcctctgctacaaccagcagaagatcagcgtggccggaagccctgccgatccaacgcccatcacggcgttgtacgtcgcgtcaggcgacgacgatcacccgtacgtgccgctcggctacacgaggatcaactcggacctgaacgagggagctggcgggaagtacatctacctctgctacaccaaggaccctgctgccatcccgtcggacgaggacggcttgccgatccgcggcatcagggtcatcgggaacgagaaggtcgagaacgtcgtcacgccctacggcttcaccaagatcgacaaggacctgaacgagggcgctggcggagactacatcttcgtctgcttctcccgccacctcgac

SEQ ID NO: 149 - DNA, 1437 bp, Artificial Sequence
  maize codon optimized
atggcagagcccaacaagggtggagcgcctgcgatgaagaacgtcgccaagcccagcaccaagcggctgatccctagctcgatagccgcgtcgtctcagacgtccgcgaatgctctcaccgagccactccctggatcggacgccatcggacagtcgtacgacgccttcggcttcttcgccaatccccgcagcatcatgaaggagctcttcgagttcagcccccaggaggagatcgtggtcgagggcaacacctggctgctcagcagcgacttcgtctacaccgccatccgcgacacagagacgagcaccgtgtccaggcgcaccaaggacgactactccaaggagctcgcagtgaaggtcaagctcagcggcagctacggctacttcagcgccagcgtcgagtcggacttcagccagagcatctcggacgcgaccgacactacctacaccagcgtgcgcacccacgtcaacaagtggcgcctcagcctcaaggacgacgttggagccctcaggtccaagctgctgccaggcgtcaagcaggcccttgccacgatggacgctacccaactgttcgacaccttcggcacccactacgtcagcgaagtcctcgtcggaggaagggccgactatgtcgccaccacgaagacctcggccttcagcagctcgaccagcatctcagtcgccgctgaagcctcgttccagagcatcgctggaggcgaggtgagccccgagtcgaaggtgctcgctgagatgctccgcgagaactcgagcacacgcctgtatgccctcggaggtagcgcacttcccaacatcaccgaccccgcgacctacaacgcctggctggagagcatcgacaccatccccgtcttctgcggcttcacccagaactcgctcaagtccatcagcgagctcgccgatagcgcccaaaggcgcgatgcgctggcaaaggcctcccagtcctacatccccagctacgtcactcggcctgcagttgtcggcctcgaggtgatcatctccgactcgaactcggagtctccaccatacggctacacccggatcgactacgacctcaaccggaacgctggcgggaagtacgtcttcctctgctacaagcagaagaacatctcggtcggcggagacgcggatgccatcactgacgtcctcgtcgtctacggcaacgaccggaatccgagcgtgccatccgggtacacgaagatcgacaaggacctgaactcgggagctggcgggaagtacatctacttctgctactcgaaggacaagcgcaagcaggaggagggccttccgatacgcggtctcagagtcgtcggacctcaccctacctcggtcgcgccgtacggcttcagcaagatcgacatcgacctgaacatgggcgctggtggagacttcatctacctgtgcaagtcgcgccacctggag

SEQ ID NO: 150 - DNA, 1437 bp, Artificial Sequence
  maize codon optimized
atggccgaaccgaacaagggcggagcgccagcgatgaagaacgtcgccaagccgagcacgaagcgcctgatccctagctcgattgccgccagctctcagaccagcgccaacgcactcaccgaaccactgccaggctcggatgccatcggacagtcgtacgacgccttcggcttcttcgccaacccgcgcagcatcatgaaggagctcttcgagttcagcccgcaggaggagatcgtcgtggaaggcaacacctggctcctctcgagcgacttcgtctacaccgccatccgggacacagagaccagcacggtctcgaggcgcaccaaggacgactacagcaaggagctcgccgtgaaggtgaagctcagcggcagctacggctacttcagcgcaagcgtcgagtccgacttcagccagagcatctccgacgcgaccgacaccacctacaccagcgtgcggacgcacgtcaacaagtggcggctcagcctcaaggacgacgtgggtgcactccgcagcaaactccttcccggagtcaagcaggcacttgcaacgatggacgcaacccagctcttcgacacgttcggcacgcactacgtcagcgaggtcctcgtcggaggtagagccgactacgtcgccaccaccaagacgtcggccttcagcagctccacgtcgatctcagtcgcagccgaagcctccttccagagcatcgcaggaggagaggtcagccctgagtccaaggtccttgccgagatgctccgcgagaactcgagcaccaggctctacgccctcggaggaagcgcactcccgaacatcaccgacccagcgacgtacaacgcgtggttggagagcatcgacaccatccccgtcttctgcggcttcacccagaactccctcaagagcatcagcgagctcgccgacagcgcacagaggagagacgctctcgccaaagcctcgcagtcgtacatccccagctacgtcacgagaccagcagtcgtcggactcgaggtcatcatcagcgactcgaactcggagtcaccaccctacggatacacgcgcatcgactacgacctcaaccgcaacgcaggcgggaagtacgtcttcctctgctacaagcagaagaacatcagcgtgggaggcgacgcagatgccatcacggacgttctcgtcgtctacggcaacgacaggaaccccagcgtccctagcggctacaccaagatcgacaaggacctgaactccggagcaggtgggaagtacatctacttctgctacagcaaggacaagcgcaagcaggaggaggggctccctatcagaggtctgcgcgttgtcggaccacaccctacgagcgttgcaccgtacggcttcagcaagatcgacatcgacctcaacatgggcgctggaggcgacttcatctacctctgcaagagccgccacctcgag

SEQ ID NO: 151 - DNA, 1437 bp, Artificial Sequence
  maize codon optimized
atggcggagcccaacaagggaggagcacccgcgatgaagaacgtggccaagccaagcaccaagaggctgatcccgagctcaatcgccgcgagctctcagaccagcgctaacgcgctgaccgaaccactgccagggtcagacgcgatcggacagtcctacgacgccttcggcttcttcgccaacccacgcagcatcatgaaggagctcttcgagttcagcccacaggaggagatcgtcgtcgagggtaacacctggctgctctcgtccgacttcgtctacaccgccatacgcgacaccgagacctccacagtctccaggcgcaccaaggacgactactccaaggagctggccgtcaaggtcaagctcagcggcagctacggctacttcagcgcatccgtcgagtcggacttcagccagtcgatctccgacgcgaccgacacgacctacacctccgtcaggacgcacgtcaacaagtggcgcctcagcctcaaggacgacgttggcgcactcaggtcgaagctccttcccggcgtcaagcaggcactcgctacgatggacgcaacccagctgttcgacacgttcggcacgcactacgtctccgaggtccttgtcggcggtagagcggactacgtcgccaccaccaagacgagcgccttcagcagctcgacgtccatctcagttgcagccgaggcgtctttccagagcatagctggcggtgaggtgagccctgagtccaaggtccttgcggagatgctgcgcgagaactcgtcgacgagactgtacgcacttggcggtagcgcactgccgaacatcacggaccctgcgacgtacaacgcctggcttgagagcatcgacaccatcccggtcttctgcggcttcacccagaactcgctcaagagcatctcggagctcgccgactcagctcagcgcagggatgcgctcgctaaggcatcccagtcgtacatcccgtcctacgtcaccagacctgcagtcgttgggctcgaggtgatcatctcggactccaactcggagtcgcctccatacggttacacgcgcatcgactacgacctcaaccgcaacgccggtggcaagtacgtcttcctgtgctacaagcagaagaacatctccgtcggtggcgacgcagacgccatcactgacgtcctcgtggtctacggcaacgatcgcaacccctcagtgccctcaggctacacgaagatcgacaaggacctcaactccggcgctggcgggaagtacatctacttctgctactcgaaggacaagcggaagcaggaggagggcctccccatacgcggtcttcgcgttgtcggaccacatccgacgtcagtggcaccctacggcttctccaagatcgacatcgacctcaacatgggcgcaggtggcgacttcatctacctctgcaagtcccggcatctggag

SEQ ID NO: 152 - DNA, 1437 bp, Artificial Sequence
  maize codon optimized
atggcagagccgaacaagggtggagcacctgcgatgaagaacgtcgccaagccgtcgaccaaacgcctgatcccgagctcgatagccgcttcgagccagactagcgccaacgctctgacggagccccttcctgggtctgacgcgatcggccagagctacgacgcattcgggttcttcgccaatccccgcagcatcatgaaggagctgttcgagttcagcccacaggaggagatcgtcgtcgaaggcaacacctggcttctcagcagcgacttcgtctacaccgccatccgcgacacagagacctcgaccgtctcgaggcgcaccaaggacgactacagcaaggagctggccgtgaaggtgaagctcagcggaagctacggctacttcagcgctagcgtggagagcgacttcagccagagcatcagcgacgctaccgacacgacgtacaccagcgtccgcacccacgtcaacaagtggcgcctcagcctcaaggacgacgtcggagctctccggagcaagctccttcctggtgtcaagcaggctctcgctacgatggacgcaacccagctcttcgacacgttcggcacccactacgtcagcgaggtcctcgtcggtggaagagccgactacgtcgccaccaccaagaccagcgccttcagctcgagcacctccatcagcgtcgctgcagaggcgtcgtttcagagcatcgcaggaggcgaagtcagccccgagagcaaggtcctcgccgagatgctgcgcgagaactccagcacacggctctacgcactgggaggctcagcactcccgaacatcacggacccagcgacctacaacgcctggctggagagcatcgacaccatcccggtcttctgcggcttcacccagaactccctcaagtcgatcagcgagctcgcggattcagcccaacgcagagacgcactcgcgaaggcatcccagtcgtacatccccagctacgtcactcgcccagcagtcgtgggcctcgaggtcatcatctccgactccaactccgagagccctccatacggctacacccggatcgactacgacctcaaccgcaatgccggaggcaagtacgtcttcctctgctacaagcagaagaacatctccgtcggaggtgacgcagacgcgatcacggacgtcctcgtcgtctacggcaacgaccggaacccaagcgtgccctcaggctacaccaagatcgacaaggacctgaactccggagctggagggaagtacatctacttctgctactccaaggacaagcgcaagcaggaggagggccttccgatacgcggacttcgcgtcgttggaccacaccctacgtcagtggcaccgtacggcttcagcaagatcgacatcgacctcaacatgggcgcaggtggggacttcatctacctctgcaagtcgcggcacctcgag

SEQ ID NO: 153 - DNA, 1437 bp, Artificial Sequence
  maize codon optimized
atggcggagccgaacaagggcggagcaccagcgatgaagaacgtggccaagcccagcacgaaacgcctgatccctagctcgatcgcagctagctctcaaaccagcgccaacgcgttgacagagccgttgcccggatctgacgccatcggacagtcgtacgacgccttcggattcttcgcgaacccacgctccatcatgaaggagctcttcgagttctcgccacaggaggagatcgtcgtcgagggaaacacgtggctgctctcctcagacttcgtctacaccgccatccgggacacagagacctcaacggtcagcaggaggaccaaggacgactactccaaggagctcgccgtgaaggtcaagctcagcggatcgtacggctacttcagcgcgtcagtggagtccgacttcagccagagcatctcagacgcgaccgacaccacctacaccagcgtcaggacccacgtcaacaagtggcggctcagcctcaaggacgacgtcggagcactcaggagcaagctgcttcccggtgtcaagcaggcactggcgacgatggacgcaactcagctcttcgacaccttcggaacccactacgtgagcgaagtcctggtcggtggcagagcagactacgtcgcgaccacgaagacgtccgccttcagcagctccacgtcgatcagcgtcgctgcagaggcttccttccagtccatcgccggaggagaagtctcgccagagtccaaggttctggcggagatgctgcgcgagaactcctcgactaggctgtacgcactcggaggtagcgcactcccgaacatcacggacccagcgacctacaacgcctggctcgagtccatcgacacgatccccgtgttctgcggcttcacccagaactccctcaagtcgatctccgagctcgccgacagcgcacaaaggcgcgatgcactcgcaaaggctagccagagctacatccccagctacgtcaccagacctgcagtcgtcggcctcgaggtcatcatctccgactcgaacagcgagtccccaccctatggctacacccgcatcgactacgacctgaaccggaacgccggagggaagtacgtcttcctctgctacaagcagaagaacatctccgtcggtggagacgctgacgccatcactgacgtgctcgtcgtctacggcaacgaccgcaacccatcggtcccatccggctacaccaagatcgacaaggacctcaactctggcgcaggtgggaagtacatctacttctgctacagcaaggacaagcgcaagcaggaggagggccttcccatacgcggacttcgcgtcgttggacctcacccaacgtctgtcgcaccatacggcttcagcaagatcgacatcgacctcaacatgggcgcgggaggagacttcatctacctctgcaagtcgcggcacctggag

SEQ ID NO: 154 - DNA, 25 bp, Artificial Sequence
  cloning primer
gattacgaattcgcccaaatagagc

SEQ ID NO: 155 - DNA, 26 bp, Artificial Sequence
  cloning primer
gctaactcgagctagtctaaatgacg

SEQ ID NO: 156 - DNA, 41 bp, Artificial Sequence
  cloning primer
gctgcagggatcgagggaagggaacccaacaaaggtggtgc

SEQ ID NO: 157 - protein, 5 aa, Artificial Sequence
  fusion protein linker
EEKKN

SEQ ID NO: 158 - protein, 342 aa, Tupidanthus calyptratus
MSSSTSTSSSSSSSGDGIVWRAINSLGKGFDLTSDFRLKYCKGNHPLVLLNQTHTKQLLVPGFGYFNHVSSDINCGKGERTRYQSDILDFNQMSEFMNQRSSVPGKIPSGLFNSMFGFESESWAKEAASTKCLGLDAYFISLFHLRINRYPLVLCDEVRNAVPSTWDPSALARFIEKYGTHIIVSLGIGGQDTVVVRQDKSSNLEASDLKKYLDQLGDQLFTGTCTFTPKQRNHKAPAAFNVFDHQSTLFDNFSSVKTKNGVNVICSKRGGDVSAHTHCEWLLTVPSMPDAIQFSFIPITSLLKGVPGNGFLTHAINLYLRCDDGKETSNRDAVISRRHEMQ

SEQ ID NO: 159 - protein, 253 aa, Vernonia noveboracensis
MGSSNKEVALRLKAAAESAIGAIGLGYDVTEDLRLKYCKGKSAADRLIGIDDERVRDILIPGGILIQNVSKSINCDKGERMRFSSDILPFQQMAEQFNKDVSLTGRIPTGQFNAAFEFTGSWQKDAANTKALALDGVFITLYNITLEKSQIALRDHVKYDVPSSWEPAALAKFIEKFGTHVIVGVKMGGKDIVYMKQQQLSTLPSDEVQKKLKDVAEKRFSGLHVDNPRRTHDPELVVTSLPMISYNLLALCS

SEQ ID NO: 160 - protein, 266 aa, Tupidanthus calyptratus
MEGGEETVKPIGLRAMESLGLGFDFASDFRLKFAKRCPGAGGDDRLVVLDEASRRDVVFPGGGVIRGVPECIRCDKGDRIRFKSDVLKFNQMSELVNQKSSVQGKVPSGYFNAMFDLSGSWFNDAADSNHLAFDGYFISLYYLHLIASPLVLRDKVKNSVPSHWNPASLSRFILTYGTHIIVGLAVGGQDVICVKQRPSSGIPPAELRGYLEDLGDCMFSDGRNPVLERKTRDGKQKVPEVFNRMLQSHTMQFSSITETSSKDVRL

SEQ ID NO: 161 - protein, 598 aa, Dryopteris erythrosora
MASGKDAAALAAVEALGCGFDLTSDYRLKYRKGPLLHLQQSHNKDLTIPGGITIQDVSRDVKCDKGERIRFASEVMQFQQMSQLFNQNASVEGKIPLGLFNAMFDLSGSWQDDANQIKSLAFDGCFITLYKLHLTRSNLVLREEVKKDIPSVWDPQSLAKFIEKYGTHIIVSASVGGQDVLYLKENYYSLLTAQDIHKKLKSAGEDYFSDSGGKRNTNFKDCETLPLNALNSQPFRGTIANTHSAQLLITNKDFTIISQRRGGFHFAKTHCEWQETVNIVPEAISLSFVPITSLLLGVAGSGFLQHAINLYLRYKPPVNDLQYFLDFQVPRQWIPIHNELPLRLARKQVFSPSLQFSLTSPKLYINNNEVVVNKKPVTGIRLYLEGRKSNRLAIHLQHLSVLPQSLGQFWSESTQTESPWWNGSNDAPKDWFEPVEWKCFSHVCTQPIKYKPEWLNERGSAFVVTGARLDVKVHGLKSVLHLHLLFSKIPGCTIQRSRWDQHPAAEKTSFFSSISTTFSSTTKAGKKGPPVVVDSAVFMGGPPRPIQSPKLLKFVDTAELTKGPQDSPGHWVVTAARLELDRGKISLGVKFSLLNYAE

SEQ ID NO: 162 - protein, 265 aa, Tupidanthus calyptratus
MEEEGGKPIEVIAMESLGLGFDFASDFKLKFAKRCPDGAGDDGRLVVIDEANKRDVVFPGGGVIRGVPESIRCGKGDRIRFKSDVLKFNQMSELINQKSSVQGKVPSGYFNAMFDLSGSWFNDAADSNHLAFDGYFISLYYLHLIASPLVLRDKVKNSVPSHWNPASLSRFILTYGTHIIVGLAVGGQDVICVKQRPSSGIPPAELRGYLEDLGDCMFSDGRNPVLERKTRDGKQKVPEVFNRMLQSHTMQFSSITETSSKDVRL

SEQ ID NO: 163 - protein, 332 aa, Asparagus retrofractus
MEGSEEREPVEVRALRSLGLGFDLTNDFRLNFARRRGRRRLVELDEADTRDIVIPGNITIKDVPVDVGCDKGDRMRFRSDVLEFNQMSELLNQRSSIQGKVPSGYFNSLFDLSGAWLDDAKNTKHLAFDGYFISLYNLHLRSSPLVLRDEVKKAVPSKWEPALLSRFIQTYGTHIIVEMAVGGQDVICVKQSHSSTISSAELKLHLEDLGDILFSDERSLSPLHRKGKEGKSKAPDVFFKILQSNNLQLSSHSESSSKDGITVICSKRGGDAYLCNHSKWLQTVPITPDAILFKFVPITSLLTGVPGSGYLSHAINLYLRYKPDPEDLQHFC

SEQ ID NO: 164 - protein, 598 aa, Dryopteris filix-mas
MASGKDAAAVAAVEALGCGFDLTSDYRLKYRKGPLLHLQHSYTKDLAIPGGITIPDVSRDVKCDKGERIRFASEVMQFQQMSQWFNQNASVEGKIPLGLFNAMFDLSGSWQDDANQLKNLAFDGYFITLYKLHLARSNLVLREEVKNDIPSVWDPQSLAKFIEKYGTHIIVSASVGGQDVLYLKENYSSLLSTQDIHKKLKSAGDDYFSDRGGENSTNFKESETLPLNALSSQPFRATVAHIHSAQVLVTNKDFTIISQRRGGYHFAKTHCGWQETVNIFPEAISLSFVPITSLLVGVAGSGFLQHAINLYLRYKPPVSDIQYFLDFQVPRQWIPIHNELPLRLARKQTFSPSLQFSLTGPKLYINNNEVVVNRKPVTGIRLYLEGRKSNRLAIHLQHLSVLPQSLGQFWNEGTELESPQWNGSNDAPKEWFEPVEWKCFSHVCTQPIKYKPEWLNERGSAFVVTGARLEVKAHGLKNILHLHLLFSKIPGCTIQRSRWGQHPAAEKTGFFSSISTTFSSTTKAGKKGPPVVVDSAVFIGGPPRPIQSPKLLKFVDTTELTKGPQDAPGHWVVTAARLELDRGKISVSVKFSLLNYSE

SEQ ID NO: 165 - protein, 611 aa, Ophioglossum pendulum
MLGTKKGASHTRQAQNTALSAVHALGCGFDATSDFRLHGCKRTGPLVEVDKNFTQTLSVPGLFSIPNVSKDIKCDKGEFTRFASDVMDFQQMSELFNQNASIEGKVPLGFFNSSFDFSGSWQTDAKNSKNLAIYGSFITLYTLQLTRSPLILREEVKEAVPSTWEPAGLARFIEKYGTHIIISVSIGGQDVLYLKQNHSSSMTSSDVHSFLTKLGDQYFRDGSSQKNISKLNETNEKLAQYYASFSQPTHMQVAQLHSGRLLFGDKELTVTSKRRGGDLWATKHEEWQRAVKSSPDAISMSFIPITSLLSGVPGKGFLNHAINLYLRYKPPIEEIQYFLDFQVPRQWAPVYSELTLGPPRRQAALPSLRFSFMGPKLYINTAQVCTDKLPVTGVRLFLEGRRHNIFAIHLQHLSSLPQVLKPYWGEDVKVEPPRWHGTNDGDSKWFEPVKWRGFSHVCIKPVKFCSEWLESQGGVFIVTGAQLDKRKYGLKSVLHLKLQFTRLLDCTLQKSCWDQTTTSSQKSGFFSALSTTFIHQNKNSKDPKPVVLNSAVLSSAPPKPSQGPKLLKFVDTKESSKGPEDIPGHWLVTAAQLELDKRKICLRVKYSLITY

SEQ ID NO: 166 - protein, 407 aa, Platycerium bifurcatum
MASKLDIPNAAKVAHLAIQSLGRGYDLTCDLRFSSFKDRNGTSLIQLRNDETIKLSLPGGVIVADVPAIVKCDKGERTRFQSDILSFDQMCQQFNQGLSLSGKVPCGLFNNMFNFSGSWQKDASTTKHLALDGWFYTLYTVEMPRSKLVLKENIKSLVPTSWEPAALARFIETFGTHIIVGVKIGGKDVVYMRQHQSSPSTPIEFQKLLTEVSNERFLQTEGRASMGSKDSRSHKKRNIEFQSWSAHLDTFSQMIYNEKHHITIIPRRKGGFDHGQSHSEWIHTVPLTPDVISVSLIPITFLLHGVAGSGFLSHAVNLYLRYNPPIEELRQFLEFQLPRVWAPVYGELPLTLPRREPSLPTLQFSLMGPKLKVSKLEFNEHGILGSRYVHPFLPKLRMVTNRVSNSV

SEQ ID NO: 167 - protein, 354 aa, Tupidanthus calyptratus
MAFNANRFDPQSAAEKAVSAIGSGYDLTVDIRLSECKPGPSGSGLIELDRTLTKDLNLPCGRVVRNVSPSIKCGKGEQTRFHSDVLTFVQMSEQFNQDISLSGKIPSGLFNAMFDFKGCWQKDAATTKSLAFDGWFFSMYNIELARSQITLSEQVKKEVPSSWDPAALAEFIEKYGTHIVVGVKMGGKDVIHLKQLQNSNLQPTEVQKLLKQLADERFSEDVNGSLIPNPEKSSGKQKEEPSIVQDLNLPFANLLRQAVVSQSKNDDLLSIRIRRGGFDTGQSHKQWLSTVSQFPNAISMSFVPLASLLSGIRGSGFLSHAINLYLRCEYAYPSIVVLVSGLIFCGVRLLSREY

SEQ ID NO: 168 - protein, 523 aa, Waldsteinia ternata
MSELLNQKSSVQGKIPSGYLNSIFGLSGDWLQDAAETKYLAFDGFFISLYNLHLTASPLVLRNKVQKSVPSRWDPAALSRFIHSYGTHIIVGMAVGGQDLVCVRQKSSSPVPPADLRRNLEDLGDFLFSDGPSLLRGKTRNGKQKIPEVFDRILQSNTMQLTTISETSSKDGLTVVCSKRGGDVFLNSHSNWLQTVLAEPEAIIFKFVPITSLLTGLPGSGYLSHAINLYLRYKPDLEDLQHFLEFQVPRQWAPMFCELPLSHQRKKASCPSLQFSFMGPKILVSSMQVSTSQKPVVGLRLYLEGKKCNRLAVHVQHLSSLPNTMELKLANTRTTRPSWWRGSDDSEFSGQFLEPIKWKRYSSICSSVVRYDPNWLKGDPGGVYIVTGAQLLSKGKWPKTILHLRLHYTFLPSCAIRKTEWAGSPEPSHKSTFLMNLSTTFTMTQRTVTDQQKQDPAALNSGVYPEGPPVLNRSAKLLKFVDTAEVVRGPHDAPGHWLVIAAKLVKEGNRIGLHTKFALLDYW

SEQ ID NO: 169 - protein, 595 aa, Lygodium flexuosum
MGTTRESSALAVAQAAIEALGCGFDVTANYRLKYCKCPVVQLPQTLVEDMLIPGGITILNVPRDITCDKGEMVRFTSEVMEFQQMSQWFNKNSSIEGKIPLGYFNAMFDLSGSWPDDATQTKSLAFDGFFITLYKLQLSRINLVLREEVLSDIPSTWDPKSLAQFIEKYGTHVIVAVNIGGQDVLYLKENRSSSLSAKEIQQHLKLAGDSCFTDGGNNRTLVSKENEMYSLTSQASVAMHSAQLFITNKDVTIIGRRRGGNPLSKSHNEWQDTVSSSPDAISMSFVPITSLITGVSGSGFLQHAINLYLRYKPPIEDLRHFLDFQVPRQWIPEYSELPLGLLRMRGITPSLQFSLLGPRLYVNTTEVTVSRKPVTGIRLYLEGKRSNRLAIHLQHLSVLPRTLDQFWNEEIHIEQPKWHGSDGSDKKWFEPVQWKSFSHVCIEPIKFQPEWQNGKDGVFVVTGAKLEVKSYGLKSILHLRLLFTKIPGCMIQASRWDQPPASQKSNFFSSLTSTFSSTTKAVKRGSPAVLVDSAVYPGGPPKPVQSSKLLKFVDTTELTRGPQDIPGHWIVTAAKLELDCQKISLRVKYSLLNFM

SEQ ID NO: 170 - protein, 390 aa, Platycerium bifurcatum
MASKLDIPNAAKVAHLAIQSLGRGYDLTCDLRFSSFKDRNGTSLIQLRNDETIKLSLPGGVIVADVPAIVKCDKGERTRFQSDILSFDQMCQQFNQGLSLSGKVPCGLFNNMFNFSGSWQKDASTTKHLALDGWFYTLYTVEMPRSKLVLKENIKSLVPTSWEPAALARFIETFGTHIIVGVKIGGKDVVYMRQHQSSPSTPIEFQKLLTEVSNERFLQTEGRASMGSKDSRSHKKRNIEFQSWSAHLDTFSQMIYNEKHHITIIPRRKGGFDHGQSHSEWIHTVPLTPDVISVSLIPITFLLHGVAGSGFLSHAVNLYLRYNPPIEELRQFLEFQLPRVWAPVYGELPLTLPRREPSLPTLQFSLMGPKLKVSKLEKCVLCRWQLGKSL

SEQ ID NO: 171 - protein, 635 aa, Microsorum musifolium (Blume)
MASAAGGFAALQPQSSEAAPPQNTPFSVAQQAIDALGRGYDVNSDLWLRYCQHTERLIESTPGPTQDLLLPGNIVIPKVSASIKCDKGDRTRFTSDVLTFNEMSEQFNQNLALSGKIPVGHFNAMFGFTGSWQRDASAVKTLAMDGVFITLYSVELPRAQLTLKEEVKAAVPSSWDPAALASFLEKYGTHVIVGVKIGGKDVVCLKQHRSSSLSAVGVQKILEAKGKERFSSLEGSAAKEKINKGKIRDGSPFGSNGMNAVNGSKDLPWISDSSTDHMVETDDVTVIFKRKGGRDLSQSHDEWLHTVPLFPDIVSMSFVPITSLLNGITGTGFLNHAINHYLRYKPPIQELHHFLEFQLPKEWAPAFGDLPLGPPRKQAGSPSLQFRLMGPKLQVNTTPVVIGKRCVTGLRLHLEGKKSNRLAIHLQYLTVVPQILQQLWQDDQPEVWEGPDDDFSKYFEPVMWKSFSHVCTAPVESTETWEDEGKGGSGSKGAQVVTGAQLDVLQCGSKKVLFLKLLYSKIHKAKIRRFEWDHAPASQQKSGIFSTLMSTTFSSAQATPQKPVQVVVNSAIYPQGPPAANSQAPKLLKFVDTSEMTRGPLDLPGHWLVTGAKLFVDRGKIAVRAKYSLLLYSVD

SEQ ID NO: 172 - protein, 594 aa, Microsorum musifolium (Blume)
MASAKDTAALAAVEALGCGFDLISDYRLKYKKGPLLQLQHSQNKDLTIPGGITIPDISRDIKCDKGERMRFASEVMQFQQMSQWFNQNASIEGKIPLGLFNAMFDLSGSWQDDANRLKNLAFDGCFITLYKLHLTRSNLVLREEVKNDIPSVWDPKSLAKFIEKYGTHIIVSASVGGQDVLYLKENYSSLLSAQDIRKKLKSAGDEYFSEISGKKSVDFKDSETLPLNSQPFRGTIAASAQLLISNKDYTVISQRRGGYHFAKTHWEWQETVNVYPEAISLSFVPITSLLLGAAGSGFLQHAVNLYLRYKPPVSDLQYFLDFQVPRQWIPVHNELPLRLARKQTFSPSLQFSFMSRKLYINNSEVVVNRKPVTGIRLYLEGRKNNRLAIHLQHLSVLPQSLDQFWREGIQIGAPQWNGSNDAPNDWFEPVEWRCFSHVCTQPIKYKPEWSSDRGSAFVVTGARLDVKAYGLKSVLHLHLLFSKVPGCSIQRSRWDQHPAEEKTGFFSSISTTFSTTTTKAGKKGPPVVVDSAVFMGGPPRPIQSPKLLKYVDTAELVKGPQDAPGHWVVTGARLELDRGKIAIKVKFSLLNYAE

SEQ ID NO: 173 - protein, 266 aa, Tupidanthus calyptratus
MEGGEETVKPIGLRAMESLGLGFDFASDFRLKFAKRCPGAGGDDRLVVLDEASRRDVVFPGGGVIRGVPECIRCDKGDRIRFKSDVLKFNQMSELVNQKSSVQGKVPSGYFNAMFDLSGSWLNDAADANHLAFDGYFITLYCLHLTASPLVLRDKVKKSVPSHWNPASLSRFILTYGTHIIVGLAVGGQDVICVKQRPSSGIPPAELRGYLEDLGDCMFSDGRNPVLERKTRDGKQKVPEVFNRMLQSHTMQFSSITETSSKDVRL

SEQ ID NO: 174 - protein, 613 aa, Tupidanthus calyptratus
MAFNANRFDPQSAAEKAVSAIGSGYDLTVDIRLSECKPGPSGSGLIELDRTLTKDLNLPCGRVVRNVSPSIKCGKGEQTRFHSDVLTFVQMSEQFNQDISLSGKIPSGLFNAMFDFKGCWQKDAATTKSLAFDGWFFSMYNIELARSQITLSEQVKKEVPSSWDPAALAEFIEKYGTHIVVGVKMGGKDVIHLKQLQNSNLQPTEVQKLLKQLADERFSEDVNGSLIPNPEKSSGKQKEEPSIVQDLNLPFANLLRQAVVSQSKNDDLLSIRIRRGGFDTGQSHKQWLSTVSQFPNAISMSFVPLASLLSGIRGSGFLSHAINLYLRYKPPMEELEQFLEFQVPRQWAPVYGDLPLAPRRKKQASPSLKFTFMGPRLYVNTIRVDSENRPVTGIRLYLEGKKSDHLAIHLQHLSTPPKRLQLSDDLSYEPIDEPAEKGYLEAVKWSMFSHICTQPVQYNGARIDDSASIVTKAWFEVKGIGMKKVLFLRLGFSTVASAVIRRSEWDGPTMSTRKSGLMSMLISTRFSTGLTEKPELRKKLDLNSAIYPEGPPLPTRAPKMLSFVDTKETVRGPEVPPGYWVVTGAKLCVEGGRIRVKVKYSLLTIMSEDSLFI

SEQ ID NO: 175 - protein, 605 aa, Blechnum gibbum
MASKHDIPNAAKVANVAIQSLGRGYDLACDLRFSSCKDFHGTSLVELNNKETHELSLPGGVVVANVPTIVKCDKGERTHFRSDILTFDQMSQQFNQGLSLSGKVPCGLFNYMFNFTGSWPKDASTTRHLALDGWFYTLYTVEMPRSQLVLKEDIKASVPTSWEPAPLARFIETFGTHIIVGAKIGGKDVVYMKQHQSSPSTSVDFQKLLAEVSDERFSQTEGRASVGSKDSRSNKKRIVEFQSWSAHLDIYNEKHHVTIIPRRKGGFDHGQSHSEWIYTVPLAPDVISVSLVPITSLLNGIAGNGFLSHAVNLYLRYKPPIEELRQFLEFQLPREWAPIFSELPLSLSRRELSPSTLQFTLMGPKLKVSKLQVTVGKKPVTGMRLFLEGKRCDKLAIHLQHLSAIPKFLQSLWEDHPFAREATWQDPDDYSTKYFEPVQWKNFSHVCTAPVENTETWIGDHAGASVVVGAQLAVKSFGLRNVLYLRLLYSKIPEAKIRRSEWDHMPASTQKSGMFSNFFSTSFSSAPAAAPVKVPAVVINSGIYPEGPPKPIHDPKLLKFVDTTEMTKGPQDMPGHWLVTGAKLYLDKRKISLRVKYSLLTVSSD

SEQ ID NO: 176 - protein, 643 aa, Rumohra adiantiformis
MASTVGGLGAAMQPQSSQAALPRNIKPSSALSVAHQAVDALGRGYDVNSDLWLRYCNRTERLIENDNSGPTQDLLLPGNIAIPNVPTSIKCDKGDRMRFTSEILTFNEMSEQFNQNLSISGKIPVGHFNAMFGFSGSWQKDASLVKTLAMDGVFINLYSVELPRAQLTLKEKVRAAVPSSWDPAALASFVEKYGTHVIVGVKIGGKDVICLKQHRSSSLSAVGVQKLMESKAKERFSSVDGLAGKEKINKGKIRDGSPYGTIGMNAVSGLKDGMRLSLINDSSSDHSTVETDDVTVIFKRKGGRDVSQSHEEWLHTVASAPDIVSMSFVPITSLLSGVTGTGFLSHAINHYLRYKPPIQELHHFLEFQLPKEWAPAFGDLPLGPPRKQPGSPSLQFRLMGPKLQVNTTPVVIGKRCVTGLRLHLEGKKSNRLAVHLQYLTVVPQILQRLWEDDQPEEWEGPDDDFSKYFEPVMWKSFSHVCTAPVESNDTWEDEGGKDAPAALVVTGAQLDVEQYGSKKVLFLRLLYSKIHKARVRRSEWDHAPASQQKSGIFSTLMSTTFSSAQSAPQKPIQVVVNSAIYPDGPPPAKSQAPKLLKFVDTTEMTRGPLDLPGHWLVTGAKLFVDRGKIAVRAKYSLLLYSVD

SEQ ID NO: 177 - protein, 636 aa, Onoclea sensibilis
MSSAVGGLAAMQAQSSERASPQNMAFSVAQQAVEALGRGYDVNSDLWLRYCKRGEHLIENDNSGPTQDLLLPGNIIIPNVPTTIKCDKGDRTRFTSDVLTFNEMSEQFNQNLSISGKIPVGHFNAMFGFSGSWQKDASQVKTLAMDGVFINLYSVELPRAQLTLKEEVRAAVPSSWDPAALASFVEKYGTHVIVGVKIGGKDMICLKQHRSSSLSAVGVQKILETKSKERFSSAEGSAAKEKINKGKIRDGSTYESNGMNAVNGSKDGMPLSWMTDSSTDLETDDVTVIFKRKGGRDISQSHDEWLHTVPSAPDIVSMSFVPITSLLNGVTGTGFLSHAINHYLRYKPPIQELHHFLEFQLPKEWAPAFGDLPLGPARKQQGSPSLQFRLMGPKLQVNTTPVVIGKRCVTGLRLHLEGKKSNRLAVHLQYLTVVPQILQRLWEDDQPEEWEGPDEDFGKYFEPVMWKSFSHVCTAPVESNETWVDEAKGEPGPKGAQVVTGAQLDVEQHGSKKVLFLRLLYSKIHKATIRRSEWDHTPASQQKSGIFSTLMSTPFSAQAAPLKPAQVVVNSAIYPQGPPPAKNQAPKLLKFVDTTEMTRGPLDLPGHWLVTGAKLFVDRGKIAVRAKYSLLLYSVY

SEQ ID NO: 178 - protein, 368 aa, Lygodium flexuosum
MYSLTSQASVAMHSAQLFITNKDVTIIGRRRGGNPLSKSHNEWQDTVSSSPDAISMSFVPITSLITGVSGSGFLQHAINLYLRYKPPIEDLRHFLDFQVPRQWIPEYSELPLGLLRMRGITPSLQFSLLGPRLYVNTTEVTVSRKPVTGIRLYLEGKRSNRLAIHLQHLSVLPRTLDQFWNEEIHIEQPKWHGSDGSDKKWFEPVQWKSFSHVCIEPIKFQPEWQNGKDGVFVVTGAKLEVKSYGLKSILHLRLLFTKIPGCMIQASRWDQPPASQKSNFFSSLTSTFSSTTKAVKRGSPAVLVDSAVYPGGPPKPVQSSKLLKFVDTTELTRGPQDIPGHWIVTAAKLELDCQKISLRVKYSLLNFM

SEQ ID NO: 179 - protein, 384 aa, Tupidanthus calyptratus
MAFNANRFDPQSAAEKAVSAIGSGYDLTVDIRLSECKPGPSGSGLIELDRTLTKDLNLPCGRVVRNVSPSIKCGKGEQTRFHSDVLTFVQMSEQFNQDISLSGKIPSGLFNAMFDFKGCWQKDAATTKSLAFDGWFFSMYNIELARSQITLSEQVKKEVPSSWDPAALAEFIEKYGTHIVVGVKMGGKDVIHLKQLQNSNLQPTEVQKLLKQLADERFSEDVNGSLIPNPEKSSGKQKEEPSIVQDLNLPFANLLRQAVVSQSKNDDLLSIRIRRGGFDTGQSHKQWLSTVSQFPNAISMSFVPLASLLSGIRGSGFLSHAINLYLRYKPPMEELEQFLEFQVPRQWAPVYGDLPLAPRRKKQASPSLKFTFMGPRLYVNTIRV

SEQ ID NO: 180 - protein, 629 aa, Sphaeropteris cooperi
MAAIAATQQHALPPPTVAKKAVEALGCGYDVTSDLWLRYCKGDGCLIEGHDSGPTQNLVLPGNVVLPNVPAYVKCDKGDRTRFTSDVLTFNQMSEHFNQNLSITGKIPLGHFNTMFGFTGSWQKDASTVKNLALDGVFINLYSVELPRTQLSLKEEVRAAVPTSWDPAALASFVEKYGTHIVVGVKIGGKDVIYLKQHRSSSLPAVGIQKILETKANERFSSVEGSTSKEKINKGKIRDGSTLEANVNNNVNAYYGGLKDGESFPWINDSISQVCENEEVTVIFKRKGGLEPSQSHNEWLHTVPLAPDVTSMCFVPITSLLNGFAGTGFLSHAINLYLRYKPPIQELHHFLEFQLPKEWAPAFGDLPLGPPRKHEGSPSLQFRLMGPKLQVNTTPVVIGKRPVTGLRLHLEGKKSNRLAVHLQYLSVVPRILQPLWEEDHVGGQEKWTGPDDGFFRYFEPVMWKSFSHVCTAPVEAPVENNETLGEGAFVVTGAQLQVEQHDSRKVLFLRLLYSKIPKARIRRGEWDHTPASQQKSGIFSTLMSTTFSAAQTPPLKPVQVVINSAVYPEGPPAAKSQTPKLLRFVDTTEMTRGPLDLPGHWLVTGAKLFVDRGKISVRAKYSLLFYSTE

SEQ ID NO: 181 - protein, 610 aa, Tupidanthus calyptratus
MSSSTSTSSSSSSSGDGIVWRAINSLGKGFDLTSDFRLKYCKGNHPLVLLNQTHTKQLLVPGFGYFNHVSSDINCGKGERTRYQSDILDFNQMSEFMNQRSSVPGKIPSGLFNSMFGFESESWAKEAASTKCLGLDAYFISLFHLRINRYPLVLCDEVRNAVPSTWDPSALARFIEKYGTHIIVSLGIGGQDTVVVRQDKSSNLEASDLKKYLDQLGDQLFTGTCTFTPKQRNHKAPAAFNVFDHQSTLFDNFSSVKTKNGVNVICSKRGGDVSAHTHCEWLLTVPSMPDAIQFSFIPITSLLKGVPGNGFLTHAINLYLRYKPPLDDLQYFLDFQAYKIWGPVHSELTLGPATNRALGTPTLHFNLIGPKLYVNTTRVTTEKRPVTGMRLYLEGMKCNRLAIHLQHLSNTPQFLHNKVGDALLWRGSEQFADGYLQPIQWKKFSHISTAPVKYDPQWTTKKEVSFIVTGAQLHVKKHDSKSVLHLRLLYSKVSNSCIIQSNWMQCPSYLSQKTGFFSAISTSILLGASTEKEDVKKVVVDSSAYPNGPPVAVQTQRLLKFVDMSEICRGPSDSPGHWLVTGAKLELEKGKICLHVKFSLLNIFDKNREP

SEQ ID NO: 182 - protein, 597 aa, Asplenium australasicum
MASGKDAVVLAAVESLGCGFDLTSDYRLKYKKGPLLHLQHSNKKDLTIPGGITIPDVSRDIKCDKGERIRFTSEVMQFQQMSQWFNQNSSVEGKIPLGLFNAMFDLSGSWQDDASQIKNLAFDGFFITLYKLHLARSNLVLREEVKNDIPSVWDPKSLAKFIEKYGTHIIVSASVGGQDVLYLKENYSSPLSAQDVHKNLKSVGDDYFADRAQRSTNYKDSETLPLNALNSQTFRPTVAHINSAQVLHSCKDFTIISQRRGGYLFAKTHCGWQETVNMFPDAISLSFVPITSLLLGVAGSGFLQHAINLYLRYKPPVSDIQYFLDFQVPRQWIPVHNELPLRLTGRQPFSPSLQFSFMSPKLYVNNNEVVVDRKPLTGIRLYLEGRKSNRLAIHLQHLSVLPQSLGQLWSDSTKSEAHLWNSSADAPREWHEPVMWKCFSHVCTQPIKYKREWSTDHESVFIVTGARLEVKAHGLKSVLHLHLLFSKISGCTIQRSRWHQHQTAEKAGFFSTLSTTFSSTAKAGKKGPPAVVDSAVYIGGPPRPIESPKLLKYVDTAELTKGPQDAPGHWVVTAARLDLEGGKIMLSVKFSLLNYAE

SEQ ID NO: 183 - protein, 611 aa, Colysis wrightii (Ching)
MASKPGIPNAAKVARLALQSLGRGYDLTCDLRFSSFKDVNGASLIDLRDNQTIDLSLPGGVVIANVPAIINCDKGERTRFRSDILSFDQMSQQFNHGLSLSGKIPCGLFNNMFSFTGSWQKDASTTKHLALDGWFYTLYTMEMPRSQLDLKEDIKASVPSSWEPAALARFIETFGTHIIVGVKIGGKDVVYMKQHQSSPSTSIDFQKLLSEVSDERFLHTEGRTSVGSKDSRSNKKHNIEFQSWSAHLDTFSQNIYNDKKHHVTIMPRRKGGFDHGQGHSDWIHTVPLAPDVISVSLIPITFLLHGVAGSGFLSHAVNLYLRYNPPIEELRQFLEFQLPREWAPVYSELPLTLPRREPSLSTLQFSLLGPKLKVCKLEVAVGKKPVTGMRLFLEGKRCDKLAVHLQHLSAIPRFLQPLWEDHPFAKEVTWQDPDDYSTKYFEPVQWKNFSHVCTAPVENTETWIGDHAGASVVVGAQLAVKSFGLRNVLYLRLLYSKIPEAKIRRSEWDHMPALAQKSGMFSSFLSTTFSSTPALPKAPAVVINSGIYPEGPPKPVRDPKLLKFVDTTEMTKGPQDMPGHWLVTGAKLYLDKRKISLRVKYSLLTVSSDCP

SEQ ID NO: 184 - protein, 636 aa, Aglaomorpha (Roberts)
MASAAGGFAALQPQSSEAARPQYTPFSVAQQAVDALGRGYDVNSDLWLRYCQHTERLIDSNPGPTQDLLLPGNILIPKVSASIKCDKGDRTRFTSDVLTFNEMSEQFNQNLAMSGKIPVGHFNSMFGFSGSWQRDASAVKTLAMDGVFITLYSVELPRAQLTLKEEVKAAVPSSWDPAALASFLEKYGTHVIVGVKIGGKDVICLKQHRTSSMSAVGVQKILEAKGKERFSSIEGSAAKEKINKGKIRDGSPFGSNGMNAVNGSKDLPWMSDSSTEYSTVETDDVTVIFKRKGGRDLSQSHEEWLRTVPSFPDIVSMSFVPITSLLNGVTGTGFLNHAINHYLRYKPPIQELHHFLEFQLPKEWAPAFGDLPLGPPRKQAGSPSLQFRLMGPKLQVNTTPVVIGKRCVTGLRLHLEGKKSNRLAIHLQYLTVVPQILQQLWQDDQPEEWEGPDDDFSKYFEPVMWKSFSHVCTAPVESTETWEDEGKGGPGSKGAQVVTGAQLDVLHCGSKKVLFLKLLYSRIHKTKIRRSEWDHTSASQQKSGIFSTLMSTTFSSAQAAPQKPVQVVVNSAIYPQGPPAANSQAPKLLKFVDTSEMTRGPLDLPGHWLVTGAKLFVDRGKIAVRAKYSLLLYSVD

SEQ ID NO: 185 - protein, 304 aa, Asplenium prolongatum x Asplenium antiquum (Kurata)
MSSTAFSIAQQAVDALGRGYNVNFDVSLSYGKQGKRLIEIDESGPTQDLLLPGNIIIPNMPASIKCDKGERTRFTTEFLTFNEMSELFNQNLAISGKIPTGHFNTMFDFSGSWQKDASQVKTLALDGFFINLYTVELPRAQLTLKEEVRAAVPSSWDPAALASFVKKYGTHVIVGVKIGGKDVVCLKQHRTSQLSTVRVQKILEEKAKERFTSIAGGTSKEKINKGKIRDGFSYGSDVMNAVNGSKDGLSLSWMNDSLSDLLTVETADVKVMFKRKGGKDVSQSHEEWLHTVPAAPDIVSMSFV

SEQ ID NO: 186 - protein, 618 aa, Verbascum chaixii (Vill)
MAFNPHSSRMDAKAAAEKAVSVIGFGYDLTSDIRLSACKPGPSGSGLIELERSRTKDLVVPGNVVVSNVSGSIKCDKGERTRFSSDALQFNQMSEQFNQELSLSGKIPSGLFNTMFGFKDCWQNDVSTSKILAFDGWLISLYTIELERSQITLSDKVKQEVPSTWDPPALAEFIEKYGTHVIVGVKMGGKDAIHIKQLKNSNLQPTEVQKLLKQLADKEFSEDENGNPIADPDTSPGKSKVQQSMIWDLHIPFASTMRPSVVSHSKNDDLLSIHIRRGGLDSGQSHNKWLSTVSQYPNVISMSFVPIGSLLSGIRGSGFLSHAINLYVRYKPPLEELTQFLEYQLPRQWAPAYNDLPLGPCLRKKASPSLQFTLLGPKLYVNTIKVDTANRPVTGLRLYLEGKRSDHLAIHLQHLLSLPQSLHLSPDHNYEPCDDSIDRAYFEPVKWSIFSHICTAPVEYHGARFDDSASIVTKAWFEVKGVGIKKVLFLRLGFSNVSSAIIRRSEWAGPTSTSKKSGLISMLMSTPFSTALNNNNNQTDKLNKINLNSAVYPGGPPSPAKAPKMSHFVDMKEMVRGPEEPPGYWVVTGAKLCVEMGMVRIKVKYSLLTIFSDDSLFM

SEQ ID NO: 187 - protein, 393 aa, Vernonia noveboracensis
MSQKLVENAIDSLGKGFDLTSDFRLKYCKGKERLVLLNENRSKELLVPGFGSFKEVSPDIKCDKGDRVRFQSDILDFNQMSEFFNKKCSVPGKIPTGLFNSMFGFQSGSWATDAANTKSLGLDGYFIMLFNVHLDRYPLVLSDEVLNAVPSTWDPPALARFIEKYGTHVVVGLGIGGRDVILLKQSKSSKLDSSQLKKHLEDLGDQLFNGSCTFSPHQLKTKEHKNKTPSAFNTIFDPEPMLFNGFSSTTQKDGLTIMCSKRGGDLTSTTHCEWLLTVPSMPDAINFDFIPITSLLPGVPGKGFLSHAINLYLRYKPPIADLEYFLDFQAHKIWAPVHNDLSLGPTTNRAIRDTSLNFNLMGPKLYVNTTQVTITKKPVTGMRLYLEGMKSNR

SEQ ID NO: 188 - protein, 384 aa, Prostanthera rotundifolia
MASNGGSSRKEIAVRLRRAAEEAVECIGQGYDLTQDLRLKYCKKQQSRLIPVDDGKVRDIAIPGGILVQNVPQAINCDKGERMRFSSDVLSFQQMSEQFNQELSLSHKIPTGHFNAAFEFTGSWQKDAAFTKSLAFDGVFITLYSIALEKSQVTLQDHVKQAVPSSWDPAALARFIEKYGTHIIIGVKMGGKDVVYVKQHYSSPLQPIDVQQRLKDAADKRFSDANGQSSMHPEKSYGREMPVSNERGFAFSDPGTPSFHSNQEEFTFFWRRRGGGSDRNMPHTKWSQTVQIEPEVISMSFIPISSLLSGIDGSGFLGHAINLYLRYKPPIEELHQFLEFQLPKQWAPVFGNVPLGPDRKQQGAASLQFSLMGPKLYVNTEEVD

SEQ ID NO: 189 - protein, 558 aa, Tupidanthus calyptratus
MSSSTSTSSSSSSSGDGIVWRAINSLGKGFDLTSDFRLKYCKGNHPLVLLNQTHTKQLLVPGFGYFNHVSSDINCGKGERTRYQSDILDFNQMSEFMNQRSSVPGKIPSGLFNSMFGFESESWAKEAASTKCLGLDAYFISLFHLRINRYPLVLCDEVRNAVPSTWDPSALARFIEKYGTHIIVSLGIGGQDTVVVRQDKSSNLEASDLKKYLDQLGDQLFTGTCTFTPKQRNHKAPAAFNVFDHQSTLFDNFSSVKTKNGVNVICSKRGGDVSAHTHCEWLLTVPSMPDAIQFSFIPITSLLKGVPGNGFLTHAINLYLRYKPPLDDLQYFLDFQAYKIWGPVHSELTLGPATNRALGTPTLHFNLIGPKLYVNTTRVTTEKRPVTGMRLYLEGMKCNRLAIHLQHLSNTPQFLHNKVGDALLWRGSEQFADGYLQPIQWKKFSHISTAPVKYDPKWSSKKDVTFIVTGAQIHVKKLNSMSALHLRLLYSKVSGSCIDQSNWMQCQSDLSQKSGFFSALSSSILLGHCTVKLDAVPIRSFPKVRIVFSSKFIDIIWW

SEQ ID NO: 190 - protein, 546 aa, Asparagus retrofractus
MEGSEEREPVEVRALRSLGLGFDLTNDFRLNFARRRGRRRLVELDEADTRDIVIPGNITIKDVPVDVGCDKGDRMRFRSDVLEFNQMSELLNQRSSIQGKVPSGYFNSLFDLSGAWLDDAKNTKHLAFDGYFISLYNLHLRSSPLVLRDEVKKAVPSKWEPALLSRFIQTYGTHIIVEMAVGGQDVICVKQSHSSTISSAELKLHLEDLGDILFSDERSLSPLHRKGKEGKSKAPDVFFKILQSNNLQLSSHSESSSKDINPILRICSIFAKPSIRQWAPMFNDFTLGPQRRKAFYPSLQFRFLGPVLRVNTTQVTSNQKPVVGLRLFLEGSKCNRLAIHLQHLSSLPSMFTTSTSSMSQWKGSEESGSGFLEPIQWKKYASICTCPVKYDPEWLEKASLDGVFVVTGAQLITKGNWPKKSLHIRLLFTHIPNCSILRTEWARTPASTSHKGSFLTNISTTFTQRDNATHKHEPSVILNSGVYPDGPPVPIQSRKLLKFVDMAEVVKGPQDIPGHWLVIGARLVKESGKIGLHVKFALLNYSESQG

SEQ ID NO: 191 - protein, 630 aa, Lygodium japonicum
MFYTSSSSSAPSDPASVAKQAVDALGRGYDVTGDLWLSKCREPLIVDLAESSPTQDLAIPGGISLPCVPAPIKCDKGDRTRFASDILSFSEMSEQFNKTLSIAGKIPLGLFNSMFGFTGLWQKDASSTKTLGLDGVFINLYSVEVPRTHLTLREEVRKAVPSSWDPAALASFVEKYGTHVIVGVKIGGKDVVYIKQRHSSTLSGVSIQKILETKALERFSSGETCTSKEKLTKGKDFQTKGIHGAEPNGQNGNLLRGHVDGIENSESFSLMEDSSTFSVDGDVTVIYKRKGGRESCQSHNDWLHTVPLAPDVVSMSFVPITTLLNGVPGTGFLSHAINLYLRYKPPLQELSNFLEFQLPKEWAPAFGDLPLGPPRKQQEVPSLQFRLMGPKLHINTTPVVVGKRPVTGLRLYLEGKKSNRLAIHLQYLTAVPQILKTLWVEDGGGEEEWVGPEEDFSKYLEPVQWRNFSHVCTAPVENSETWLGGPGGALVVVGARLQVQQYGAKKVLFLHLLYSRIAKARIRRSEWDHMPASQQKSGLFSTLISTTFSSAAAQSPAPPKPVVINSAIYPEGPPVPGQMPKLLKFVDTTEMTRGPHDLPGHWLVTGAKLLLERGKISLRAKYSLLLYSVE

SEQ ID NO: 192 - protein, 389 aa, Celosia argentea (Sylphid)
MALKLSAAKAAEVAIGSIGRGYDISADLRLKFCKGDTLDSHLIEIDEDHCQEIALPGGISIPNVPTSIKCDKGERTRFRSDVLSFQQMSEQFNQEISLTGKIPSGLFNTMFEFSGCWQKDAAYTKTLAFDGVFITLYTVALEKSQLVLRDHVKQAVPSSWEPAALARFIEKFGTHIIVGIKMGGKDVVFVKQQHSSSLQPAEVQKKLKEIADKRFLEANGQSEFNAGHIYQDGKFDAREQRLRFADLSPSCSYSHKEDIVTICKRRGGSDIKNLPHHEWLQTVQSEPDVISMSFIPITSLLNGVPGSGFLSHAINLYLRYKPPLEELHQFLEFQLPRQWAPVFSELPLGPQRRQQNYASLQFSFMGPKLYVNTIPVLFLECFYFYFCVT

SEQ ID NO: 193 - protein, 391 aa, Sphaeropteris cooperi
MMSSADVHKHLKNLGDQMFAEKGVQKIQDGNSLRGCSIAPVEIDGTNILYKSKDLTIIAKKRGGRLCAKTPSEWQATVMSAPDVIMMSFVPITALLSGTPGSGFLNHAINLYLRYKPPIEDIRCFLEFQVPRQWAPVYSDLPLGPPQRAITLPSLQFCLMGPRLYVNTAQISVGRKPVTGLRLYLEGRQNNRLAIHLQHLASLPRVLEPYWNPEIHEQSNWHGSDNVESSEWFEHVQCRTFSHVCTARVKYNPVWTRSKSGVFVVTGAQLEVKSYGLKNVLHLRLQFSRIPGCTILKSRWYQPCSSNLSEKSRFFSTLSTAFTSHMVKKPVQPSPVVVDSGVFLGEPPIPIQQPKLLRFVDTRELTKGPQDMPGHWLVIGAQLDVDGARSL

SEQ ID NO: 194 - protein, 593 aa, Platycerium bifurcatum
MASAKEAAALAAVEALGCGFDLTSDYRLKYKKGSLLELQHSHNKDLTIPGCITIPDVSRGIKCDKGEHMRFTSEVMQFQQMSQWFNQNASVEGKIPLGLFNAMFDLSGSWQDDANRLKNLAFDGCFITLYKLHLTRSNLVLREEVKNDIPSVWDPKSLAKFIEKYGTHIIVSASVGGQDVLYLKENYSSLISAQEIRKKLKSAGDEYFSETSGKRNADFKHSETSPLNSQPFRGTIAGSAQLLISNKDYTLISQRRGGYYFAKTHCEWQETVNMYPEAISLSFIPITSLLLGAVGSGFLQHAINLYLRYKPPVSDLQYFLDYQVPRQWIPVHNELPLRLARKQAFSPSLQFSLMSPKLYIDNNEVVVSRKPVTGIRLYLEGRKNNRLAIHLQHLSVLPQSLGKFWSEGIQIEAPLWNGSSDAPNEWFEPVEWKCFSHVCTQPIKYKPEWSNEQGSAFVVTGAQLGVKAHGLKSVLHLHLLFSKIPGCSIQRSRWDQHPAAEKTGFFSSISTTFSTTTKAGKKGPPVVVDSAVYMGGPPRPIQSPKLLKFVDTAELTKGPQDAPGHWVVTAARLELDRGKIAIKVKFSLLNYAE

SEQ ID NO: 195 - protein, 603 aa, Platycerium bifurcatum
MASKLDIPNAAKVAHLAIQSLGRGYDLTCDLRFSSFKDRNGTSLIQLRNDETIKLSLPGGVIVADVPAIVKCDKGERTRFQSDILSFDQMCQQFNQGLSLSGKVPCGLFNNMFNFSGSWQKDASTTKHLALDGWFYTLYTVEMPRSKLVLKENIKSLVPTSWEPAALARFIETFGTHIIVGVKIGGKDVVYMRQHQSSPSTPIEFQKLLTEVSNERFLQTEGRASMGSKDSRSHKKRNIEFQSWSAHLDTFSQMIYNEKHHITIIPRRKGGFDHGQSHSEWIHTVPLTPDVISVSLIPITFLLHGVAGSGFLSHAVNLYLRYNPPIEELRQFLEFQLPRVWAPVYGELPLTLPRREPSLPTLQFSFMGPKLKVAVGKKPVTGLRLFLEGKRCNKLAIHLQHLSAIPKFLQPLWENHPFAREVTWQDPDDYSTKYFEPVQWKNFSHVCTAPVENTETWIGDHAGASVVVGAQLAVKSFGLRNVLYLRLLYSKIPEAKIRRSEWDHMPALTQKSGMFSSFLSTTFSSTPAPPKVPAVVINSGIYSEGPPNPVRDPKLLKFVDTTEMTKGPQDMPGHWLVTGAKLYLDKRKISLRVKYSLLTVNSD

SEQ ID NO: 196 - protein, 519 aa, Vernonia noveboracensis
MSEQFNQEISLTGKIPSGLFNAMFEYSGSWQKDASSTKTLAFDGVFISLYTVALEKSQMVLCDNVKKAVPSSWDPALLARFIEKFGTHIIVGVKMGGKDVIYMKQQHASSLQPADVQKRLKAMADKRFLDADGQYIIDAEHTSHNDKDDIRGQRLRFADADPSSSYSYKEDLVSIYKRRGGCDDRNLKHNEWLHGVQLEPDVITMSFIPITSLLNGVSGSGYLSHAINLYLRYKPPVEELHQFLEFQLPRQWAPVFSDLPLGPQRKQQTTPSLQFSFFGPKLYVNINPVDVGKRPVTGLRLYLEGKRSNRLAIHLQHLSSLPKVFQLEDDVDGNLAEESYDRRYYEKVQWKHFSHVCTAPVESDDELSIVTGAHLHVGDYGFKRILFLRLRFSTVVGAAAIKNPEWDGSPGLARKSGLISTLISHHFTAVLKSQPQAAEVNINSAIYPGGPPAPVQVPKLLKFVDTAEMTRGPQESPGYWVVSGARLVVDKGKISLRVKYSLLTVISADEEEEAAAAFY

SEQ ID NO: 197 - protein, 295 aa, Sphaeropteris cooperi
MMSSADVHKHLKNLGDQMFAEKGVQKIQDGNSLRGCSIAPVEIDGTNILYKSKDLTIIAKKRGGRLCAKTPSEWQATVMSAPDVIMMSFVPITALLSGTPGSGFLNHAINLYLRYKPPIEDIRCFLEFQVPRQWAPVYSDLPLGPPQRAITLPSLQFCLMGPRLYVNTAQISVGRKPVTGLRLYLEGRKNNRLAIHLQHLSSLPRVLEPHWNAEVAHEQSNWHGSDNVGSSEWFEHVQCRSFSHVSTARVKYNPEWARGKTGVFVVTGAQLDVKNYGLKNVLQHSSRQVQSCVDT

SEQ ID NO: 198 - protein, 624 aa, Tupidanthus calyptratus
MAFNANRFDPQSAAEKAVSAIGSGYDLTVDIRLSECKPGPSGSGLIELDRTLTKDLNLPCGRVVRNVSPSIKCGKGEQTRFHSDVLTFVQMSEQFNQDISLSGKIPSGLFNAMFDFKGCWQKDAATTKSLAFDGWFFSMYNIELARSQITLSEQVKKEVPSSWDPAALAEFIEKYGTHIVVGVKMGGKDVIHLKQLQNSNLQPTEVQKLLKQLADERFSEDVNGSLIPNPEKSSGKQKEEPSIVQDLNLPFANLLRQAVVSQSKNDDLLSIRSFDTSQSHKQWLSTVTQFPNAISMSFVPLASLLSGIRGSGFLSHAINLYLRYKPPMEELEQFLEFQDKPPMEELEQFLEFQVPRQWAPVYGDLPLAPRRKKQASPSLKFTFMGPRLYVNTIRVDSENRPVTGIRLYLEGKKSDHLAIHLQHLSTPPKRLQLSDDLSYEPIDEPAEKGYLEAVKWSMFSHICTQPVQYNGARIDDSASIVTKAWFEVKGIGMKKVLFLRLGFSTVASAVIRRSEWDGPTMSTRKSGLMSMLISTRFSTGLTEKPELRKKLDLNSAIYPEGPPLPTRAPKMLSFVDTKETVRGPEVPPGYWVVTGAKLCVEGGRIRVKVKYSLLTIMSEDSLFI

SEQ ID NO: 199 - protein, 609 aa, Onoclea sensibilis
MASKHDIPNAAKVANIAIQSLGRGYDLICDLRFSSCKDVHGAPLIDLSNKETHKLSLPGGVVVANVPTIVKCDKGERTHFRSDILTFDQMSQQFNQGLSLSGKVPCGLFNYMFNFTGSWQKDASTTRHLALDGWFYTLYTVEIPRSQLVLKEDIKASVPTSWEPAALARFIETFGTHIIVGAKIGGKDVVYMKQHQSSPSTSIDFQKLLAEVSDERFLQTESRASVGSKDSRSNKKHSVEFQSWSAHLDTFSQIIYNEKHHVTIIPRRKGGFDHGQSHSEWIHTVPLAPDVISVSLVPITLLLNGVAGSGFLSHAVNLYLRYKPHIEELRQFLEFQLPREWAPVFSELPLTLSRREHSPSTLQFTLMGPKLKVSKLQVTVGKKPVTGMRLFLEGKRCNKLAIHLQHLSAIPKFLQSLWEDHPFAREATWQDPDDYSTKYFEPVQWKNFSHVCTAPVENTETWMGDHAGASIVVGAQLAVKSFGLRNVLYLRLLYSKIPEAKIRRSEWDHMPASTQKSGMFSNFLSTTFSSAPAAPAKVPVVVINSGIYPEGPPKPVHDPKLLKFVDTTEMTKGPQDMPGHWVVTGAKLYLDKKKIALRVKYSLLTVSSD

SEQ ID NO: 200 - protein, 509 aa, Tupidanthus calyptratus
MSEQFNQEMSLTGKIPSGVFNTMFEFTGSWQKDAANTKTLAFDGVFITLYTVALEKTQMILSDHVKQAVPSSWDPAALARFIEKFGTHIIVGVKMGGKDVIYMKQQHSSSLQPSDVQKRLKTIADKRFVDASGQYGMDSEQTHQNDKFQIREQRLRFADTSPSSSYSYKEDIVIICKRRGGSDNKNLTHNEWLHNVQLEPDVISMSFIPITSLLNGVSGSGFLSHAINLYLRYKPPVEELHQFLEFQLPRQWAPVFSDLPLGPQRRQQSTSSLQFSLMGPKLYVNTTPVDVGKRPVTGLRLYLEGKRSNRLAMHMQHLSSLPKVFQLKDDPNGNFRQESYDHRYYEKVQWKNFSHICTAPVESDEDLSIVTGAQLEVGDYGFKRVLFLRLRFSTVLGAVAVKHPEWDGSPGLARKSGLISTLISHHFTATLKPPPQPADVNINSAIYPGGPPAPTQSAKLLKFVDTTEMTRGPQETPGYWVVSGARLMVEKGRISLKRVGFHFGSSTRY

SEQ ID NO: 201 - protein, 353 aa, Platycerium wandae
MASKLDIPNAAKVAHLAIQSLGRGYDLTCDLRFSSFKDRNGTSLIQLRNDETIKLSLPGGVIVADVPAIVKCDKGERTRFQSDILSFDQMCQQFNQGLSLSGKVPCGLFNNMFNFSGSWQKDASTTKHLALDGWFYTLYTVEMPRSKLVLKENIKSLVPTSWEPAALARFIETFGTHIIVGVKIGGKDVVYMRQHQSSPSTPIEFQKLLTEVSNERFLQTEGRASMGSKDSRSHKKRNIEFQSWSAHLDTFSQMIYNEKHHITIIPRRKGGFDHGQSHSEWIHTVPLTPDVISVSLIPITFLLHGVAGSGFLSHAVNLYLRFFLQIIHLLKSCASFWSFSSPVYGPQFMVNCL

SEQ ID NO: 202 - protein, 339 aa, Phormium (Lancer Terra Cotta)
MRPTDLMTPEAAAAAAVSAVGYGYDLVGDLRLSSCKAGPSGSRLIKIDDALVHDLVLPGGVVVPNVPKEIRCDKGERTRFRSDVLGFHQMAEQFNQDLSLSGKIPSGLFNAMFDFRGCWQKDLSSTKSLAFDGWFITLYSIELAKSHIVLQDKIKQEIPSSWDPVALAEFIEKYGTHIIVGIKMGGKDAVSIKQLQESALQQTEVQNLLKNLADDAFSEDFNANILLGAAEISKRLKGIKLANQENNAAVLKSMNSSIVTHLKKDDIVSIHVRRGGINTKQSHNQWLSTISQAPNVISMSFVPITSLLTGVRGSGFLSHAVNLYLRCQQQSETQNRASS

SEQ ID NO: 203 - protein, 676 aa, Lygodium japonicum
MKPAAATIRPNFFTSSSSSAPSDPASVAKQAVDALGRGYDVTGDLWLSKCREPLIVDLAESSPTQDLAIPGGISLPCVPAPIKCDKGDRTRFASDILSFSEMSEQFNKTLSIAGKIPLGLFNSMFGFTGLWQKDASSTKTLGLDGVFINLYSVEVPRTHLTLREEVRKAVPSSWDPAALASFVEKYGTHVIVGVKIGGKDVVYIKQRHSSTLSGVSIQKILETKALERFSSGETCTSKEKLTKGKSTLSAVSIQKILETKALERFSSGETCTSKEKLTKGKDFQTKGIHGAEPNGQNGNLLRGHVDGIENSESFSLMEDSSTFSVDGDVTVIYKRKGGRESCQSHNDWLHTVPLAPDVVSMSFVPITTLLNGVPGTGFLSHAINLYLRYKPPLQELSNFLEFQLPKEWAPAFGDLPLGPPRKQQEVPSLQFRLMGPKLHINTTPVVVGKRPVTGLRLYLEGKKSNRLAIHLQYLTAVPQILKTLWVEDGGGEEEWVGPEEDFSKYLEPVQWRNFSHVCTAPVENSETWLGGPGGALVVVGARLQVQQYGAKKVLFLHLLYSRIAKARIRRSEWDHMPASQQKSGLFSTLISTTFSSAAAQSPAPPKPVVINSAIYPEGPPVPGQMPKLLKFVDTTEMTRGPHDLPGHWLVTGAKLLLERGKISLRAKYSLLLYSVE

SEQ ID NO: 204 - protein, 585 aa, Sphaeropteris cooperi
MGSESIARKVALEAVQSLGRGFDVTADFRTKFCKQRLVDVVNDGFVSLRLPGSIIIDAPSVVTCDKGDCIRHTTDLMQFQQVYLQIWNTHCHFNAMYDFTGSWFEDAMQTKNLAFDGKFITLFQLQLTSSLLLRKEVKNAVPSAWEPAALARFISLYGTHIVVRVSVGGQDVLYLKENASSMMSSADVHKHLKNLGDQMFAEKGVQKIQDGNSLRGCSIAPVEIDGTNILYKSKDLTIIAKKRGGRLCAKTPSEWQATVMSAPDVIMMSFVPITALLSGTPGSGFLNHAINLYLRYKPPIEDIRCFLEFQVPRQWAPVYSDLPLGPPQRAITLPSLQFCLMGPRLYVNTAQISVGRKPVTGLRLYLEGRQNNRLAIHLQHLASLPRVLEPYWNPEIHEQSNWHGSDNVESSEWFEHVQCRTFSHVCTARVKYNPVWTRSKSGVFVVTGAQLEVKSYGLKNVLHLRLQFSRIPGCTILKSRWYQPCSSNLSEKSRFFSTLSTAFTSHMVKKPVQPSPVVVDSGVFLGEPPIPIQQPKLLRFVDTRELTKGPQDMPGHWLVIGAQLDVDGGKISLNAKYSLLNFDFK

SEQ ID NO: 205 - protein, 323 aa, Tupidanthus calyptratus
MALKLPAPEAAKIAIQSIGCGYDICLDLRLKYRKRDSTNLSLIEIHEDQEKEIVLPGGILIPNVSKAIKCDKGEHARFRSDVLSFQQMSEQFNQEMSLTGKIPSGVFNTMFEFTGSWQKDAAHTKTLAFDGLFITLYTVALDKSQMVLSDHVKKAVPSSWDPAALARFIEKFGTHIIVGVKMGGKDVIYMKQQHSSSLQPSDVQKRLKTIADKRFVDARGQSGMDSEQTYQKDKFQVREQRLRFADTSLSRFADTSLSSSYSYKEDIVSICMRRGGNDNKNLTHNEWLHNVQLEPDAISMSFIPEWCLREWIPEPCHKSLLTL

SEQ ID NO: 206 - protein, 605 aa, Tupidanthus calyptratus
MAFNANRFDPQSAAEKAVSAIGSGYDLTVDIRLSECKPGPSGSGLIELDRTLTKDLNLPCGRVVRNVSPSIKCGKGEQTRFHSDVLTFVQMSEQFNQDISLSGKIPSGLFNAMFDFKGCWQKDAATTKSLAFDGWFFSMYNIELARSQITLSEQVKKEVPSSWDPAALAEFIEKYGTHIVVGVKMGGKDVIHLKQLQNSNLQPTEVQKLLKQLADERFSEDVNGSLIPNPEKSSGKQKEEPSIVQDLNLPFANLLRQAVVSQSKNDDLLSIRIRRGGFDTGQSHKQWLSTVSQFPNAISMSFVPLASLLSGIRGSGFLSHAINLYLRYKPPMEELEQFLEFQVPRQWAPVYGDLPLAPRRKKQASPSLKFTFMGPRLYVNTIRVDSENRPVTGIRLYLEGKKSDHLAIHLQHLSTPPKRLQLSDDLSYEPIDEPAEKGYLEAVKWSMFSHICTQPVQYNGARIDDSASIVTKAWFEVKGIGMKKVLFLRLGFSTVASAVIRRSEWDGPTMSTRKSGLMSMLISTRFSTGLTEKPELRKKLDLNSAIYPGGPPLPTKAPKMSSFVDTKEMVRGPEDPPGYWMVTGRAHPCQQEPQKCCLLWIRKKR

SEQ ID NO: 207 - protein, 596 aa, Symphoricarpos x chenaultii (Hancock)
MSDAIVRKALSSLGKGFDLTSDFRLKYCKGDDRLVVLNETNTTDLHVPGFGAFNGVSVDIKCDKGDRTRYQSDILDFNQMSEFFNQKSSVPGKIPSGLFNAMFGFESGSWAMDAGKTKHLGLDGYFIIMANVHIDRYPLVLSDEVRNAVPSNWDPSALARFIEKYGTHVIVGLSIGGQDVLLVRQDKSSNMEPSQLKNHLDNLGDQLFTGTCTFSPNIYLKTKDYKHKTPPAFNIFDPQPLPFNNSTSITAKDGINVISSKRGGDLSANTHCEWLLTVPSRPDAINFGFIPITSLLKGVPGKGFLSHAINLYLRYKPPIGDLQYFLDFQAHKIWAPVHNDLSLGPTTNRAIPTPALHFKFIGPTLYVNTTQVTVGRRPITGMRLYLEGMRCNRLAVHLQHLSNTPVLLQNKIDDAQKWRGSEEVADERYYEPIQWKKFSHICTAQVKYDPNWSTKKDVTFIVTGAQLHVKKHDSKTVLHLRLLYSKVSGSCIVQSNWMQSSSENSQKSGFFSAISMSMAGSSERDKTPAVVVDSSVYPTGPPVPVQSQKLLKFVDMSQLCRGPLDSPGHWLATGAKLDLEKGKICLRVKFSLLNIC

SEQ ID NO: 208 - protein, 621 aa, Blechnum gibbum
MASGKDAAALAAVEALGCGFDLTSDYRLKYRKGPLLHLQHSSNKDLAIPGGITIPDVSRDVKCDKGERIRFASEVMQFQQMSQWFNQNASVEGKIPLGLFNAMFDLSGSWQDDAKQLKNLAFDGYFITLYKLHLTRSNLVLREEIKNDIPSVWDPLSLAKFIEKYGVKNDIPSVWDPLSLAKFIEKYGTHVIVSASVGGQDVLYLKENYSSLLSAQDIHKQLKSVGDGYFSDRGGEKSGNFKDNETLPLNALNSQPFRATVAHLHSAQVLVTNKDFTIISQRRGGYHFAKTHCGWQETVNIFPEAISLSFVPITSLISGFAGSGFLQHAINLYLRYKPPVSDIQYFLDFQVPRQWIPIHNELPLRLARKQTFSPSLQFSLTSPKLYINNNEVVVNRKPVTGIRLYLEGRKSNRLAIHIQHLSVLPQSLGQFWNEGTQLESPRWNGSNDAPKEWFEPVEWKCFSHVCTQPIKYKPEWLHDRDSAFVVTGARLEVKVHGLKSVLHLHLLFSKIPGCTIQRSRWDEHPAAEKTGFFSSISTTFSSTTKAGGKKGPPVLVDSAVFVGGPPRPIQCPKLLKYVDTAELTKGPQDAPGHWVVTAARLDLDGGKISLRVKFSLLNYAE

SEQ ID NO: 209 - protein, 593 aa, Platycerium wandae
MASAKEAAALAAVEALGCGFDLTSDYRLKYKKGSLLELQHSHNKDLTIPGCITIPDVSRGIKCDKGEHMRFTSEVMQFQQMSQWFNQNASVEGKIPLGLFNAMFDLSGSWQDDANRLKNLAFDGCFITLYKLHLTRSNLVLREEVKNDIPSVWDPKSLAKFIEKYGTHIIVSASVGGQDVLYLKENYSSLISAQEIRKKLKSAGDEYFSETSGKRNADFKHSETSPLNSQPFRGTIAGSAQLLISNKDYTLISQRRGGYYFAKTHCEWQETVNMYPEAISLSFIPITSLLLGAVGSGFLQHAINLYLRYKPPVSDLQYFLDYQVPRQWIPVHNELPLRLARKQAFSPSLQFSLMSPKLYIDNNEVVVSRKPVTGIRLYLEGRKNNRLAIHLQHLSVLPQSLGKFWSEGIQIEAPLWNGSSDAPNEWFEPVEWKCFSHVCTQPIKYKPEWSNEQGSAFVVTGAQLGVKAHGLKSVLHLHLLFSKIPGCSIQRSRWDQHPAAEKTGFFSSISTTFSTTTKAGKKGPPVVVDSAVYMGGPPRPIQSPKLLKFVDTAELTKGPQDAPGHWVVTAARLELDKGKIAIKVKFSLLNYAE

SEQ ID NO: 210 - protein, 389 aa, Waldsteinia ternata
MRMEEATTEKPIEVRALEALGQGFDLSSDFRLKFAKGLDGSKGRLVVLNEESKRDIVIPSGSGGGVVIHGVPQDIHCDKGDRIRFKSDVLEFNQMSELLNQKSSVQGKIPSGYLNSIFGLSGDWLQDAAETKYLAFDGFFISLYNLHLTASPLVLRNKVQKSVPSRWDPAALSRFIHSYGTHIIVGMAVGGQDLVCVRQKSSSPVPPADLRRNLEDLGDFLFSDGPSLLRGKTRNGKQKIPEVFDRILQSNTMQLTTISETSSKDGLTVVCSKRGGDVFLNSHSNWLQTVLAEPEAIIFKFVPITSLLTGLPGSGYLSHAINLYLRYKPDLEDLQHFLEFQVPRQWAPMFCELPLSHQRKKASCPSLQFSFMGPKILVSSMQVHLSHSV

SEQ ID NO: 211 - protein, 251 aa, Matteuccia struthiopteris
MGGFTHCIQWKCQSQLVLKEDILASVPTSWEPAALARFIETFGTHIIVGAKIGGKDVVYMKQHQSSPSTSIDFQKLLAEVSDERFLQTESRASVGSKDSRSNKKRSVEFQSWSAHLDTFSQIIYNEKHHVTIIPRRKGGFDHGQSHSEWIHTVPLDPDVISVSLVPITVLLNGVSGSGFLSHAVNLYLRYKPHIEELRQFLEFQLPREWAPVFSELPLTLSRREHSPSTLQFTLMGPKLKVNKLQKCLLCR

SEQ ID NO: 212 - protein, 439 aa, Waldsteinia ternata
MLVKQDKSSDLGPSELKKHLNELGDQHFTGTCSFSPLHSKTKDHKHRLTPQAFNVFDAPQSVAINGFSTAHTKDGITVISSKKGGDPSASSHSEWLLTVPSRPDAIHFSFIPITSLLKGVPGKGFLSQAINLYLRYKPPIADLPYFLEFQVSHKIWAPMHNDLRLGPATNSKSNPSSPAIYFSLMGPKLYVNTTQVKVGNCAPVTGMRLFLEGMKCNRLAIHLQHLANTPLMLENKIDDTSSWRGSEEVTDHGYFEAINGNKFSHVCTAPVLYDLEWTSPSSINSAFIVSGAQLVVKQHGSKSVLHLRLLFSKVLDYFIVQSVWGESSCSSSRSSPSSSSSSSSGLLDAISRPVSGGYWAKEKVEPAGEQVILDSSVFPAGPPVPLPSQKFVKYVNTSHVCKGPQNSPGHWLVTGARLNLVQGKIGLQVEFSLLNAVEY

SEQ ID NO: 213 - protein, 601 aa, Equisetum
MMAQTRAKEAIHALGRGYDAVNDLRLSHCKENLGARLIELDELHMQDLVIPGGITVRGVPKSVTCEKGERTRFKSDVLPFQQMSEQVNQWMSISGKIPLGLFNGMFGFSGHWQKDALSVKDLAIDGWLITLYSVELPKSQLVLREDVKKDVPSSWDSSALASFIEKYGTHIVVGVKIGGKDVLCVKQHQSSGVSAVEIQALLKRKADERFRKRESDSTINSEQKSDIEQNLLSNQSNPFPFCGATTTIFSSQEDATVLCNRRGGIDTGQSHDEWLQTVPGAPDAILMSLVPITSLLNGVSGSGFLSHAVNLYLRHKPPIEELTQFLEFQLPRQWAPVFSELPLGPPRKERSTSSLQFSLIGPKLRVNTAPVNVGKRPVTGLRLYLEGRKCNRLAIHIQHLSVVPRVLQPLWEDTEPRWQHGEGNEELDQRYLEPVSWRSFSHVCTAPVENTEGWTSEDENQCAYVVVGARLGVKGVGMKNVLFLDLLYSKILHTKIRRSEWDHTPTSSQRSGFFSTLMSGTFANMQRAAPVRPPLVNLNSGIFPGGPPNPSRVPKLLKFVDTTELTKGPQDMPGHWLITGARLYLERGKISLRAKYSLLIY

SEQ ID NO: 214 - protein, 601 aa, Aglaomorpha (Roberts)
MASKLDIPNAATVAHLAIQSLGRGYDLTCDLRFSSFKDVNGASLIELRDSETIELSLPGGVVVANVPAIVKCDKGERTRFRSDILAFEQMSQQFNQGLSLSGKIPCGLFNNMFNFTGSWQKNSSNTKHLALDGWFYTLYNMEMPRSQLVLKEDIKASVPSSWEPVALARFIETFGTHIVVGVKVGGKDVVYMKQHQSSPSTSIEFQKLLAEVSDERFLRSEGRASVGSKDSRSNKKHNIEFQPWSAHLDTFSQMSYNEKHHVTIIPRRKGGFDHGQSHSEWIHTVPLAPDIISVSLIPITFLLHGVAGSGFLSHASNLYLRYKPPIEELRQFLEFQLPREWAPVYSELPLTLPRREPSLSTLQFTFMGPKLKVSKLEVAVGKKPVTGMRLFLEGKRCDKLAIHLQHLSAIPRFLQPLWEDHPFSREVTWQDPDDYSTKYFEPVQWKNFSHVCTAPVENTETWIGDHAGASVVVGAQLGVKSFGLRNVLYLRLIRRSEWDHMPASTQKSGMFSSFLSTTFSSIPALPKVPAVVMNSGIYPEGPPKPVQDPKLLKFVDTTEMTKGPQDMPGHWLVTGAKLYLDKRKISLRVKYSLLTVSSDGP

SEQ ID NO: 215 - protein, 565 aa, Sphaeropteris cooperi
MASARESGRAVARAAVEALGCGFDLTADYRLKYRKGPLLNLQHSRKDLLIPGGITIPNVSRDVKCDKGERTRFTSEVMKFQQMSQWFNKNAFVEGKIPLGFFNAMFDLSGSWQHDASLTKSLAFDGCFITLYKLHLTRSNLVLREEVKKDIPSTWDPEGLARFIEKYGTHIIVAVNIGGQDVLYLKESHSSLLSTQDIHKHLKIAGDKCFSDGSGERSIDFKENEDVTIISQRRGGIVSSKTHSKWQETVDSSPDAISFSFVPITSLISGVSGSGFVQHAINIYLRYKPPVENIRYFLDFQVPRQWIPVYNELPLGLSRKQALSQSLQFSLMGPKLHVNTLQVVVIKKPVTGVRLYLEGRKSNRLAIHLQHLSVLPQCLEQFWNENAPIEQPRWHSSNEATKNWFEPVQWKSFSHVCTMPVKYKPEWLDKKGGIFVVTGARLEVKMHGLTSALHLYLLFTKIPECTIQTSRWDKPPASEKTRYFSSLSSKAGKKKATPVVMNSAVYPGGPPKPIQRRKLLKFVDMTELTKGPQDVPGHWIVTAARLELGRGKISTRVKYSLLNYS

SEQ ID NO: 216 - protein, 376 aa, Phormium (Lancer Terra Cotta)
MALKFPPRKAAEFAINSIGLGYDVAADIRLKYCKRETQDPCLIELDKDQLQDIVLPGGITVSNVPKSIKCDKGERTRFRSDVLSFQQMSEQFNQELSLSGKIPSGLFNYMFEFSNCWQKDAANTKSLAFDGWFITLYTVALAKSQIVLRDHVKQAVPSSWDPAALARFIEKFGTHVIVGVKMGGKDVIYVKQQHFSNLQPAEVQKILKDMADKRFLDVSGQYGMNSEEAFGKDKFDFKEQRLRFADSSSSSSYSTKEDIVRIFKRRGGNDNKDLPHPEWLNTVQYEPDVISMSFVPITSLLQGIPGSGFLSHAINLYLRYKPPTEELHQFLEFQLPRQWAPVFSDLPLGPQRKHQSTASLQFTFMGPKLYVNTSVW

SEQ ID NO: 217 - protein, 403 aa, Nephrolepis cordifolia (Duffii)
MQPQSSAAAPPQNTPFSVAQQAVGALGRGYDVNSDLWLRYCKRGAQLIENKPGPTQDLHLPGNIVIPNVPSSVKCDKGDRTRFTSDILTFNEMSEQFNQNLSISGKIPVGHFNAMFGFSGSWQKDASVVKTLAMDGVFITLYSVELPRTQITLKEEVRAAVPSSWDPAALASFVEKYGTHVIVGVKIGGKDAICLKQHRSSSLSAVEVQKILETKAKERFLSVEGNTAKERINKGKIRDGSPYGSNGMAALNLSKDETTLSWLSDTSTDHSTVETNDVTVIFKRKGGRENSTSHDEWLHTVASFPDIVSMSFVPITSLLNGITGTGFLSHAINHYLRYKPPIQELHHFLEFQLPKEWAPAFGDLPLGPSRKQPGSPSLQFRLMGPKLQVNTTPVVIGKRCVIR

SEQ ID NO: 218 - protein, 404 aa, Sphaeropteris cooperi
MMSSADVHKHLKNLGDQMFAEKGVQKIQDGNSLRGCSIAPVEIDGTNILYKSKDLTIIAKKRGGRLCAKTPSEWQATVMSAPDVIMMSFVPITALLSGTPGSGFLNHAINLYLRYKPPIEDIRCFLEFQVPRQWAPVYSDLPLGPPQRAITLPSLQFCLMGPRLYVNTAQISVGRKPVTGLRLYLEGRQNNRLAIHLQHLASLPRVLEPYWNPEIHEQSNWHGSDNVESSEWFEHVQCRTFSHVCTARVKYNPVWTRSKSGVFVVTGAQLEVKSYGLKNVLHLRLQFARIPGCTILKSQWYQPRSTTLSEKSRFFSTLSTAFTSQMVKKTLKPSPLVLNSGVFLGEPPRPIQRPKLLKVVDTTELTKGPQDMPGHWLVIGAQLDVDGGKISLNAKYSLLNFDFK

SEQ ID NO: 219 - protein, 644 aa, Asplenium australasicum
MASAVGRFAATQAQSSEAAQPQITSSPAFSIAQQAVDALGRGYDVNFDLRLGYCKQRKHLIENDELGPTQDLLLPGNISIPNLPASIKCDKGDRTRFTTEILTFNEMSEQFNQDLSISGKIPTGHFNNMFDFSGSWQKDASQVKTLALDGFFINLYTVELPRAQLTLKEEVRAAVPSSWDPAALASFVEKYGTHVIVGVKIGGKDVICLRQHHSSQLSAVGVQKILEAKAKERFTSIAGGTSRENNKGKIRDGFTYGSNAMIAVNGSKDGVHPSWLNSSLSDLPPVETDDVKVMFKRKGGKAVSQSHEEWLHTVPSSPDIVSMSFVPITSLLNGVTGTGFLSHAINHYLRYKPPIDQLRHFLEFQLPKDWAPAFGDLPLGPPRKQQASPSLQFRLMGPKLQVNTTPVVVGKRCVTGIRLHLEGKKSNRLAIHLQFLTVVPQILQSRWEDDQLEDWEGPDTDFSKYFEPVMWRSFSHVCTAPVESREPWAADEMAGEAALKGALVVTGAQLDVEQHGSKKVLFLRLLYSKIHKAMNRRSEWDHTPASSQRSGIFSTLISTPFSSAAASSPAAAKPVHVNSAIYPDGPPPANSQAPKLLKFVDTSEMTRGPLDLPGHWLVTGAKLCVERGKIAVRAKYSLLLYSED

SEQ ID NO: 220 - protein, 517 aa, Asplenium antiquum (makino)
MASTVGGLAAMQAQSSEAAQPPNMSFTAFSIAQQAVDALGRGYNVNLDLSLSYCKQGKRLIEIDESGPTQDLLLPGNIIIPNMPASIKCDKGDRTRFTTEVLKFNEMSEQFNQNLSISGKIPTGHFNTMFNFSGSWQKDASQVKTLALDGFFINLYTVELPRAQLTLKEEVRAAVPSSWDPAASWDPAALASFVEKYGTHVIVGVKIGGKDVVCLKQHHTSQLSTIRVQKILEEKAKERFTPIAGGTSKEKINKGKIRDGSPYGSNAMNGSKDGLSLSWMNDSLSDLLTVETDDVRVMFKRKGGKDVSQSHEEWLHTVPAAPDIVSMSFVPITSLLSGVMGTGFLSHAINHFLRYKPSIAELHHFLEFQLPKEWAPAFGDLPLGPPRKQQASPSLQFRLMGPKLQVNTMPVVVGKRCVTGIRLHLEGKKSNRLAIHLQYLTAVPQILQGLWEDHRPDNWEGPDTDFSRYFEPVMWRSFSHVCTAPVESKEPWVDEMKGEPVLKGALVVTGGPPAALL

SEQ ID NO: 221 - protein, 640 aa, Asplenium antiquum (Crissie)
MASAVGRFAATQAQSSEAAQPQITSSTAFSIAQQAVDALGRGYDVNFDLRLGYCKQRKRLIENDELGPTQDLLLPGNIIIPNMPASIKCDKGDRTRFTTEVLTFNEMSEQFNQDLSISGKIPTGHFNNMFDFSGLWQKDASQVKTLALDGFFINLYTVELPRAQLTLKEEVRAAVPSSWDPSALASFVEKYGTHVIVGVKIGGKDVICLKQHHTSQLSAVGVQKILEAKAKERFTSIAGGTSKENNKGKIRDGFSYGSNAMNAVNGSKDGVHPSWFNDSLSDLPPVETDDVKVMFKRKGGKAVSQSHEEWLHTVPAAPDIVSMSFVPITSLLNGVMGTGFLSHAINHFLRYKPSIAELHHFLEFQLPKEWAPAFGDLPLGPPRKQQASPSLQFRLMGPKLQVNTMPVVVGKSCVTGIRLHLEGKKSNRLAIHLQYLTAVPQILQGLWEDYQPESWEGPDTDFSKYFEPVMWRSFSHVCTAPVESKEPWVDEMKGEPALKGALVVTGAQLDVEQHGSKKVLFLRLLYSKIHKVRIRRSEWDHTPASQQRSGIFSTLISTHFSSAPSSPSKPVQVNSAIYPDGPPLANSQAPKLLKFVDTSAMTRGPLDLPGHWLVTGAKLDVERGKIAVRAKYSLLLYSED

SEQ ID NO: 222 - protein, 572 aa, Tupidanthus calyptratus
MEGGEETVKPIGLRAMESLGLGFDFASDFRLKFAKRCPGAGGDDRLVVLDEASRRDVVFPGGGVIRGVPECIRCDKGDRIRFKSDVLKFNQMSELVNQKSSVQGKVPSGYFNAMFDLSGSWFNDAADSNHLAFDGYFISLYYLHLIASPLVLRDKVKNSVPSHWNPASLSRFILTYGTHIIVGLAVGGQDVICVKQRPSSGIPPAELRGYLEDLGDCMFSDGRNPVLERKTRDGKQKVPEVFNRMLQSHTMQFSSITETSSKDGLTILSSKRGGDVFSQNHSNWLQTVASNPEAICFKLVPITSLLTGVPGSGYLSHAINLYLRYKPAPEDLRYFLEFQVPVQWAPLFCELPLRHQRRKASCPLLQFAFLGPKIHVSSTQVTSGEKPVVGLRLFLEGKKCNRMAIHAQHLSSLPNIMEFALSNSATSRPCQWRGSDDYISNDQFLEPVRWKRYSNVCSSVVEHDSNWIQGEEVGAFVVTGAQLISKGKWPKTILHLRLLFSYLPNCTIRKTEWAAAPEASQKSGFRLNLSTTSATSTYLSSFLERSGTGGPSGYTPEFSAAGSCFGASAPVR

SEQ ID NO: 223 - protein, 603 aa, Tupidanthus calyptratus
MALKVSAPEAAKIAIQSIGCGYDISLDLRLKCCKGDPANPRLIEIHEDQGREIVLPGGIVIPNVSKAIKCDKGEHARFRSDVLSFQQMSEQFNQEMSLTGKIPSGVFNTMFEFTGSWQKDAANTKTLAFDGVFITLYTVALEKTQMILSDHVKQAVPSSWDPAALARFIEKFGTHIIVGVKMGGKDVIYMKQQHSSSLQPSDVQKRLKTIADKRFVDASGQYGMDSEQTHQNDKFQIREQRLRFADTSPSSSYSYKEDIVIICKRRGGSDNKNLTHNEWLHNVQLEPDVISMSFIPITSLLNGVSGSGFLSHAINLYLRYKPPVEELHQFLEFQLPRQWAPVFSDLPLGPQRRQQSTSSLQFSLMGPKLYVNTTPVDVGKRPVTGLRLYLEGKRSNRLAMHMQHLSSLPKVFQLKDDPNGNFRQESYDRRYYEKVQWKNFSHICTAPVESDEDLSIVTGAQLEVGDYGFKRVLFLRLRFSTVLGAVAVKHPEWDGSPGLARKSGLISTLISHHFTATLKPPPQPADVNINSAIYPGGPPAPTQSAKLLKFVDTTEMTRGPQETPGYWVVAGARLMVEKGRISLRVKYSLLTVILPDEEALEEP

SEQ ID NO: 224 - protein, 386 aa, Tupidanthus calyptratus
MALKVSAPEAAKIAIQSIGCGYDICLDLRLKYRKRDSTNLSLIEIHEDQEKEIVLPGGILIPNVSKAIKCDKGEHARFRSDVLSFQQMSEQFNQEMSLTGKIPSGVFNTMFEFTGSWQKDAAHTKTLAFDGLFITLYTVALDKSQMVLSDHVKKAVPSSWDPAALARFIEKFGTHIIVGVKMGGKDVIYMKQQHSSSLQPSDVQKRLKTIADKRFVDARGQSGMDSEQTYQKDKFQVREQRLRFADTSLSSSYSYKEDIVSICMRRGGNDNKNLTHNEWLHNVQLEPDVISMSFIPITSLLNGVSGSGFLSHAINLYLRYKPPTEELHQFLAFQLPLHWAPVFSVHPLGLQPRQQSTASLQFSFMGPKLHVNTSPVDVGKRPVTGL

SEQ ID NO: 225 - protein, 550 aa, Tupidanthus calyptratus
MEGGEETVKPIGLRAMESLGLGFDFASDFRLKFAKRCPGAGGDDRLVVLDEASRRDVVFPGGGVIRGVPECIRCDKGDRIRFKSDVLKFNQMSELVNQKSSVQGKVPSGYFNAMFDLSGSWFNDAADSNHLAFDGYFISLYYLHLIASPLVLRDKVKNSVPSHWNPASLSRFILTYGTHIIVGLAVGGQDVICVKQRPSSGIPPAELRGYLEDLGDCMFSDGRNPVLERKTRDGKQKVPEVFNRMLQSHTMQFSSITETSSKDGLTILSSKRGGDVFSQNHSNWLQTVASNPEAICFKLVPITSLLTGVPGSGYLSHAINLYLRYKPAPEDLRYFLEFQVPVQWAPLFCELPLRHQRRKASCPLLQFAFLGPKIHVSSTQVTSGEKPVVGLRLFLEGKKCNRMAIHAQHLSSLPNIMEFALSNSATSRPCQWRGSDDYISNDQFLEPVRWKRYSNVCSSVVEHDSNWIQGEEVGAFVVTGAQLISKGKWPKTILHLRLLFSYLPNCTIRKTEWAAAPEASQKSGFRLNLAQLSHSVSELVLMHQSSFQLH

SEQ ID NO: 226 - protein, 614 aa, Bignonia chamberlaynii (Bureau)
MAYYSSSNVRMDPQLAAEKAVSVIGFGYDLTSDIRLSACKPGPSGSGLIELDRTRRKDLVVPGNVVVPNVSASIKCDKGERTRFSCDALSFSQMSEHFNQELSLSGKIPSGMFNAMFGFKGCWQSDASTTKILAFDGWFISLYRIELERSQITLSDKVKQEVPTTWDPAALAEFIDKYGTHVVVGVKMGGKDVIHIKQLQNSNLQPTEVQKLLKQLADERFCEDGNRNSVANANVSSGKPKVEQSMMWDLPLPFASTVRPPIVSHSKNNDLLSIHIRRGGLDVGQSHNQWLSTVSQHPNVISLSFVPIASLLSGIRGSGFLSHAINLYLRYKPPPEELSQFLEYQLPRQWAPAYNDLPLGPRRKKKASPSLQFTLLGPKLYVNTVKVDAGNRPVTGIRLYLEGKRSDHLAIHLQHLSTLPQSLQLSPDHSYEPSDESVDRGYFEPVKWSIFSHICTAPVEYHGARIDDSASIVTKAWFEVKGIGMKKVLFLRLGFSMVASAISRRSEWDGPTMASKKSGLISMLMSTPFSTALNQPDKPAKVDLNSAVYPGGPPSPAKAPKMSHFVDTKEIVRGPEDPPGYWVVTGAKLCVESGMIRIKVKYSLLTIVSEDSFC

SEQ ID NO: 227 - protein, 281 aa, Tupidanthus calyptratus
MEGGEETVKPIGLRAMESLGLGFDFASDFRLKFAKRCPGAGGDDRLVVLDEASRRDVVFPGGGVIRGVPECIRCDKGDRIRFKSDVLKFNQMSELVNQKSSVQGKVPSGYFNAMFDLSGSWFNDAADSNHLAFDGYFISLYYLHLIASPLVLRDKVKNSVPSHWNPASLSRFILTYGTHIIVGLAVGGQDVICVKQRPSSGIPPAELRGYLEDLGDCMFSDGRNPVLERKTRDGKQKVPEVFNRMLQSHTMQFSSITETSSKDLRASIPHLSHPFSSDLIY

SEQ ID NO: 228 - protein, 540 aa, Waldsteinia ternata
MFLQMSELLNQKSSVQGMSELLNQKSSVQGKIPSGYLNSIFGLSGDWLQDAAETKYLAFDGFFISLYNLHLTASPLVLRNKVQKSVPSRWDPAALSRFIHSYGTHIIVGMAVGGQDLVCVRQKSSSPVPPADLRRNLEDLGDFLFSDGPSLLRGKTRNGKQKIPEVFDRILQSNTMQLTTISETSSKDGLTVVCSKRGGDVFLNSHSNWLQTVLAEPEAIIFKFVPITSLLTGLPGSGYLSHAINLYLRYKPDLEDLQHFLEFQVPRQWAPMFCELPLSHQRKKASCPSLQFSFMGPKILVSSMQVSTSQKPVVGLRLYLEGKKCNRLAVHVQHLSSLPNTMELKLANTRTTRPSWWRGSDDSEFSGQFLEPIKWKRYSSICSSVVRYDPNWLKGDPGGVYIVTGAQLLSKGKWPKTILHLRLHYTFLPSCAIRKTEWAGSPEPSHKSTFLMNLSTTFTMTQRTVTDQQKQDPAALNSGVYPEGPPVLNRSAKLLKFVDTAEVVRGPHDAPGHWLVIAAKLVKEGNRIGLHTKFALLDYW

SEQ ID NO: 229 - protein, 316 aa, Marsilea mutica
MTTTTSRPNSVATAEQAVRCLGKGYDVVNDLWFRYCKGDDRLIEIDQSRPSQELVLPGNITLSEIPACVKCDQGDLTRFATDVISFNEMSEHFNKSLSITGKIPLGHFNSMFQFSGSWQKDASSVKALAYDGVFKSLYSLQMPTTLLTLKEEVKASMPSSWDPRALANFIENYGTHIIVGVTIGGRDVVCLKQLHGSSLSGDRVRKFLESSANERFLASGVSSHNAKGNSHKDDIGYNFINNVAMNEETILKDDMVNIILMRFTRKSFCILPGSLAGCLKFKNDKFNIQFSWFFTLQIVFFYIKISARVFYSCRMT

SEQ ID NO: 230 - protein, 611 aa, Phormium (Lancer Terra Cotta)
MRPTDLMTPEAAAAAAVSAVGYGYDLVGDLRLSSCKAGPSGSRLIKIDDALVHDLVLPGGVVVPNVPKEIRCDKGERTRFRSDVLGFHQMAEQFNQDLSLSGKIPSGLFNAMFDFRGCWQKDLSSTKSLAFDGWFITLYSIELAKSHIVLQDKIKQEIPSSWDPVALAEFIEKYGTHIIVGIKMGGKDAVSIKQLQESALQQTEVQNLLKNLADDAFSEDFNANILLGAAEISKRLKGIKLANQENNAAVLKSMNSSIVTHLKKDDIVSIHVRRGGINTKQSHNQWLSTISQAPNVISMSFVPITSLLTGVRGSGFLSHAVNLYLRYKPPIEELHHFLEFQLPRQWAPVFNEIPLGPQHRKRRRLPSLQFTLMGPRLHVNTDKVDSKNRPVTGIRLFLEGKRNDCLAIHLQHLSTRPNIFQLSNDSDHTSADDISLNQRDYYEPIKWALLSHICTAPVQYSGASIDDSASIVTKAWLEVKDIGMRKVLFLRLGFSNVVGMKIRRSEWDGLTNVTRKSGSISAMISSRFSTGMIPPQKPKVEINSAVFPGGPPVPIRVPKMSRFVDTTEMMRGPDDLPGYWLVTGAKLCVEGGGISLKVKYSLLVPKPEDEL

SEQ ID NO: 231 - protein, 471 aa, Tupidanthus calyptratus
MGSSKEIGLKLKATAEAAIQSIGFGYDITEDLRLKYCKGSRLIVIDDDQVRDIVIPGGILVPNVSKQINCDKGERIRFSSDGLSFQQMSEQFNQEVSLSSKIPTGHFNAAFQFTGCWQKDAANTKTLALDGVFITIYTIALEKSQITLCDHIKEAVPSSWDPAALARFIEKFGTHVIVGVKMGGKDIVYMKQQHSSPLQSDEVQKRLKHVADNRFSNASGHSTNPEKVYEREMLEINEPPQEFMDDSASSSYMDLEDITFFYRRRGGSNKKNLPHDKWCQSVQLEPDVISMSFIPISSLLSGINGNGFLTHAINLYLRYKPAIEELSQFLEFQHPRQWAPVFGELAVGPERKQQSGASLQFSFLGPKLYVNTTLVDAGKRPVTGLRLYLEGTKSNCLAIHLQHLSTLPKSFQLQDEATCNYGSNDQRYYEKVQSKSFSHVCTGPVESDEDHSIVTGAQFEVRNSETTSTAI

SEQ ID NO: 232 - protein, 381 aa, Tupidanthus calyptratus
MFSDGRNPVLERKTRDGKQKVPEVFNRMLQSHTMQFSSITETSSKDGLTILSSKRGGDVFSQNHSNWLQTVASNPEAICFKLVPITSLLTGVPDKPAPEDLRYFLEFQVPVQWAPLFCELPLRHQRRKASCPLLQFAFLGPKIHVSSTQVTSGEKPVVGLRLFLEGKKCNRMAIHAQHLSSLPNIMEFALSNSATSRPCQWRGSDDYISNDQFLEPVRWKRYSNVCSSVVEHDSNWIQGEEVGAFVVTGAQLISKGKWPKTILHLRLLFSYLPNCTIRKTEWAAAPEASQKSGFRLNLSTTFTFSQRTGADAPKQLPAALNSGVYPEGPPVPLRSKKLLKYVDVAEVVRGPHDTPGHWLVTAAKLVTDGGKIGLHVKFALL

SEQ ID NO: 233 - protein, 595 aa, Vernonia noveboracensis
MGSSNKEVALRLKAAAESAIGAIGLGYDVTEDLRLKYCKGKSAADRLIGIDDERVRDILIPGGILIQNVSKSINCDKGERMRFSSDILPFQQMAEQFNKDVSLTGRIPTGQFNAAFEFTGSWQKDAANTKALALDGVFITLYNITLEKSQIALRDHVKYDVPSSWEPAALAKFIEKFGTHVIVGVKMGGKDIVYMKQQQLSTLPSDEVQKKLKDVAEKRFSGLHVDNPRRTHDPELLERNDYGLITLDPAIEDITLFWRRRGGTYGKNLNHRTWCQTVQLEPEVISFSFVPITSLLSGIDGNGFLTHAINLYIRYKPPIEELQQFLEFQLPTRWAPEFGELAVGPEGKQQHSASLQFRFLGPKLYVNTNQVDVGDKPVTGLRLYLEGKRNDCLAIHLQHLSSMPKSFKLASEPNMNPATSPRDRRYYEKVQWKSFSHVYSAPVESDDELSIVTGAEFEVNDSGSKRVLFLRLRFAKVIGATVVRQPEWDGSPVLTQKSGIVSTMISSRFSSAQRPPPQPTTVNMNSALPGGPPVSAQGKKLLRFVDTMELTRGPQDLPGYWVVSGARLVVDKSKISLRAKFSLLAVISADEKALQ

SEQ ID NO: 234 - protein, 967 aa, Dryopteris erythrosora
MDLNDLYLQPDGPCTVRLHVGGLGPSVISSDLVQIFSSLAKVSCVDLVHTKGRNFAYVTIQAASRDIKRLFGLYNGCMWKGGRLKLEKAREFYLDKLHREWADRDCLQAIQIPNLGCSTTARSVVKSKDSSSFNIYIPKLRKVKAIPEKGLGKHKRSFERVDPLPYSLLQNCNCDQHCTATSKYQSRTKKELSDSKHATIKASPNETSTQCEQVFKPSGYKDRKGFEKKPGIYWKSGDAWGSNEVPALDESVLKGGVAHSEEGDTECITNIDEPVLNMTGLNDLCLGKTKDLVEEEVRAVIKEQAQACIEDAQQVVEGVSSLQRKRLKSDLDTWTSNKNKHLGEVGKSTDLMLQRGETYESKAFKNLPGKSWVQKASWKSLVGETGRMSFSLGSMLDQNLIVGNLESTTSIKCDKGDRTRFTSDILTFNEMSEQFNQNLSIAGKIPVGHFNAMFGFSGSWQKDASMVKTLAMDGVFINLYSVELPRAQLTLKEEVRAAVPSSWDPAALASFVEKYGTHVIVGVKIGGKDVICLKQHRSSSLSAVGVQKILQSKARERFSSVDGCAAKEKINKGKIRDGSPYGSNGINAVNVLKDGMPLPWISDSSTDLSTVETDDVTVIFKRKGGRDASQSHAEWLHTVASTPDIVSMSFVPITSLLNGVTGTGFLSHAINHYLRYKPPIQELHHFLEFQLPKEWAPAFGDLPLGPPRKQAGSPSLQFRLMGPKLQVNTTPVVIGKRCATGLRLHLEGKKSNRLAVHLQYLTVVPQILQRLWEDDQPEEWEGPDDDFSKYFEPVMWKSFSHVCTAPVESSESWEDEGKGEAGPKGALVVTGAQLDVEQHGSKKVLFLRLLYSKIHKARIRRSEWDHTPASQQKSGIFSTLMSTTFSSAQAAPPKPVQVVVNSAIYPQGPPPTKSQAPKLLKFVDTTEMTRGPLDLPGHWLVTGAKLFVDRGKIAVRAKYSLLLYSVD

SEQ ID NO: 235 - protein, 640 aa, Matteuccia struthiopteris
MSSPVGGLAATQAQSSEGALPQNINASLAFSVAQQAVNALGRGYDVNSDLWLRYCKRGERLIENDNSGPTQDLLLPGHIIIPNVPTSIKCDKGDRTRFTSDVLTFNEMSEQFNQNLSISGKIPVGHFNAMFGFSGSWQKDASQVKTLAMDGVLINLYSVELPRAQLTLKEEVRAAVPSSWDPAALASFVEKYGTHVIVGVKIGGKDMICLKQHRSSSLSAVGVQKILETKAKERFSYAESSAAKEKINKGKIRDGSTYESNGMNAVNGSKDGMPLSWMSDLSTDLETDDVTVIFKRKGGKDLSQSHDEWLHTVASAPDIVSMSFVPITTLLNGVTGTGFLSHAINHYLRYKPPIQELHHFLEFQLPKEWAPAFGDLPLGPARKQQGSPSLQFRLMGPKLQVNTTPVVIGKRCVTGLRLHLEGKKSNRLAVHLQYLTVVPQILQRLWEDDQPEEWEGPDEDFGKYFEPVMWKSFSHVCTAPVESNEAWVDEAKGEPGPKGALVVTGAQLDVEQHGSKKVLFLRLLYSKIDKATIRRSEWDHTPASQQKSGIFSTLMSTPFSAHAAPLKPSQVVVNSAIYPEGPPPAKSQAPKLLKFVDTTEMTRGPLDLPGHWLVTGAKLFVDRGKIAVRAKYSLLLYSVD

SEQ ID NO: 236 - protein, 451 aa, Tupidanthus calyptratus
MALKLPAPEAAKIAIQSIGCGYDICLDLRLKYRKRDSTNLSLIEIHEDQEKEIVLPGGILIPNVSKAIKCDKGEHARFRSDVLSFQQMSEQFNQEMSLTGKIPSGVFNTMFEFTGSWQKDAAHTKTLAFDGLFITLYTVALDKSQMVLSDHVKKAVPSSWDPAALARFIEKFGTHIIVGVKMGGKDVIYMKQQHSSSLQPSDVQKRLKTIADKRFVDASGQYGMDSEQTHQNDKFQIREQRLRFADTSPSSSYSYKEDIVIICKRRGGSDNKNLTHNEWLHNVQLEPDVISMSFIPITSLLNGVSGSGFLSHAINLYLRYKPPVEELHQFLEFQLPRQWAPVFSDLPLGPQRRQQSTSSLQFSLMGPKLYVNTTPVDVGKRPVTGLRLYLEGKRSNRLAMHMQHLSSLPKVFQLKDDPNGNFRQESYDHRYYEKVQWKELLPHLHCPSRIR

SEQ ID NO: 237 - protein, 597 aa, Tupidanthus calyptratus
MALKLPAPEAAKIAIQSIGCGYDISLDLRLKCCKGDPANPRLIEIHEDQGREIVLPGGIVIPNVSKAIKCDKGEHARFRSDVLSFQQMSEQFNQEMSLTGKIPSGVFNTMFEFTGSWQKDAAHTKTLAFDGLFITLYTVALDKSQMVLSDHVKKAVPSSWDPAALARFIEKFGTHIIVGVKMGGKDVIYMKQQHSSSLQPSDVQKRLKTIADKRFVDASGQYGMDSEQTHQNDKFQIREQRLRFADTSPSSSYSYKEDIVIICKRRGGSDNKNLTHNEWLHNVQLEPDVISMSFIPITSLLNGVSGSGFLSHAINLYLRYKPPVEELHQFLEFQLPRQWAPVFSDLPLGPQRRQQSTSSLQFSLMGPKLYVNTTPVDVGKRPVTGLRLYLEGKRSNRLAMHMQHLSSLPKVFQLKDDPNGNFRQESYDHRYYEKVQWKNFSHICTAPVESDEDLSIVTGAQLEVGDYGFKRVLFLRLRFSTVLGAVAVKHPEWDGSPGLARKSGLISTLISHHFTATLKPPPQPADVNINSAIYPGGPPAPTQSAKLLKFVDTTEMTRGPQETPGYWVVSGARLMVEKGRISLRVKYSLLAAILPDE

SEQ ID NO: 238 - protein, 386 aa, Tupidanthus calyptratus
MAFNANRFDPQSAAEKAVSAIGSGYDLTVDIRLSECKPGPSGSGLIELDRTLTKDLNLPCGRVVRNVSPSIKCGKGEQTRFHSDVLTFVQMSEQFNQDISLSGKIPSGLFNAMFDFKGCWQKDAATTKSLAFDGWFFSMYNIELARSQITLSEQVKKEVPSSWDPAALAEFIEKYGTHIVVGVKMGGKDVIHLKQLQNSNLQPTEVQKLLKQLADERFSEDVNGSLIPNPEKSSGKQKEEPSIVQDLNLPFANLLRQAVVSQSKNDDLLSIRIRRGGFDTGQSHKQWLSTVSQFPNAISMSFVPLASLLSGIRGSGFLSHAINLYLRYKPPMEELEQFLEFQVPRQWAPVYGDLPLAPRRKKQASPSLKFTFMGPRLYVNTIRVDS

SEQ ID NO: 239 - protein, 429 aa, Tupidanthus calyptratus
MGGKDVIHLKQLQNSNLQPTEVQKLLKQLADERFSEDVNGSLIPNPEKSSGKQKEEPSIVQDLNLPFANLLRQAVVSQSKNDDLLSIRIRRGGFDTGQSHKQWLSTVSQFPNAISMSFVPLASLLSGIRGSGFLSHAINLYLRYKPPMEELEQFLEFQVPRQWAPVYGDLPLAPRRKKQASPSLKFTFMGPRLYVNTIRVDSENRPVTGIRLYLEGKKSDHLAIHLQHLSTPPKRLQLSDDLSYEPIDEPAEKGYLEAVKWSMFSHICTQPVQYNGARIDDSASIVTKAWFEVKGIGMKKVLFLRLGFSTVASAVIRRSEWDGPTMSTRKSGLMSMLISTRFSTGLTEKPELRKKLDLNSAIYPEGPPLPTRAPKMLSFVDTKETVRGPEVPPGYWVVTGAKLCVEGGRIRVKVKYSLLTIMSEDSLFI

SEQ ID NO: 240 - protein, 268 aa, Lygodium japonicum
MGTTRESSALAVAQAAIEALGCGFDVTANYRLKYCKCPVVQLPQTRVEDMLIPGGITILNVPRDITCDKGEMVRFTSEVMEFQQMSQWFNKNSSIEGKIPLGYFNAMFDLSGSWPDDATQTKSLAFDGFFITLYKLQLSRINLVLRDEVLSDIPSTWDPKSLAQFIEKYGTHIIVAVNIGGQDVLYLKENRSSSLSAKEIQRHLKLAGDLCFTDGGNNRTLVSKENEMYSLTSQASVAMHSAQLFITNKVSLETICIGKCGVCSGSTI

SEQ ID NO: 241 - protein, 346 aa, Tupidanthus calyptratus
MEGGEETVKPIGLRAMESLGLGFDFASDFRLKFAKRCPGAGGDDRLVVLDEASRRDVVFPGGGVIRGVPECIRCDKGDRIRFKSDVLKFNQMSELVNQKSSVQGKVPSGYFNAMFDLSGSWFNDAADSNHLAFDGYFISLYYLHLIASPLVLRDKVKNSVPSHWNPASLSRFILTYGTHIIVGLAVGGQDVICVKQRPSSGIPPAELRGYLEDLGDCMFSDGRNPVLERKTRDGKQKVPEVFNRMLQSHTMQFSSITETSSKDGLTILSSKRGGDVFSQNHSNWLQTVASNPEAICFKLVPITSLLTGVPGSGYLSHAINLYLRYKPAPEDLRYFLEFQVPVRKCP

SEQ ID NO: 242 - protein, 519 aa, Marsilea mutica
MSEHFNKSLSITGKIPLGHFNSMFQFSGSWQKDASSVKALAYDGVFKSLYSLQMPTTLLTLKEEVKASMPSSWDPRALANFIENYGTHIIVGVTIGGRDVVCLKQLHGSSLSGDRVRKFLESSANERFLASGVSSHNAKGNSHKDDIGYNFINNVAMNEETILKDDMVNIIRKQRGGKQCLQSHKEWLQTVKDFPDILSMHFVPITSLLTGVTGSGFLNHAINLYLRYKPPIEELRYFLEFQLPKEWAPAFGDLPLGPPRKQIESPALQFRFMGPKLQVNTTQVTVGKRPVTGIRLHLEGVKGNRLAIHLQYLTVVPQILQPLLEENKDIEGQWHGPESDGDYSKYFEPVMWKSFSHVCTAPVETIDAWSEEDVDATIVTGAQLRVEQHGTKKVLVLWLLYTKIPKVGIRRPEWDHSPASQQKSGIFSTLLSTTFSSQQAQTVNKPAVQVNINSAINPYGPPTAKTHSPKLLKLVDTNEMTRGPTCQPGHWLVTGAKLAVENGKIAIKPKYSLLMYRTE

SEQ ID NO: 243 - protein, 611 aa, Schizophragma hydrangeoides
MAFNANRFDPQSGAEKAVSVIGYGYDLSADIRLSACKPGPSGSRLIELDQTLTKDLVLPGGVVVPNVSTAIKSDKGERTRFRSDVLSFNQMSEQVNQGLSLSGKIPCGVFNTMFNFRGCWAKDTAATKTLAFDGWFITLYNVELTRSHITLSKQVKHELPSVWDPAALAEFIEKYGTHIVVGVKMGGKDVIHIKQLQNSNLQPTEVQKLLKRLADERFSEDVNDSSIPGPNTLAAKLKDDSLFWDVNTPFASSIRPSVTSHSRNDDLLSIHIRRGGIDHGQSHNHWLSTVAKSPNVVSMSFVPIASLLSGVRGSGYLSHAINLYLRYKPPIEDLHQFLEFQLPRVWAPEYGDFPLGTRLKKQPSPSLQFTFMGPKLYVNTAKVDSGNRPVTGLRLYLEGKKSDHLAVHLQHLTTLPEILQLSEDPSYEPIDEPVERGYFEPVKWSIFSHVCTAPVQYNGARIDESASIVTKAWFEVRVMGVRKVLFLRLGFSSMASARIRRSEWDGPTSSSRKSGVMSMLMSTTFTTGMTPIEKPTKVELNSAVYPGGPPLPLRAPKMSYFVDTKEMVRGPEDLPGYWVVTGAKLCVEGGRIRIKVKYSLLTIMSEDSMLM

SEQ ID NO: 244 - protein, 327 aa, Waldsteinia ternata
MSEQYNKELSLSGKIPSGLFNAMFNYSGCWQKDAAPTKYLAFDGWLITLYSIELARSQLRLSEQVKRDVPSLWDPAALAAFIEKYGTHIIVGVKMGGKDIVHIKQLQNSKLEPAELQRRLKQVAEERFSDDANETSASNPTADLFGMMKDDNPLHWDIQRTLASSIKPPIVTHSMDDDVVTISVRRGGVDIGQSHNQWLSTISQAPNVISMSFVPITSLLGGTQGNGFLIHAVNLYLRYKPPIEELQQFLEFQLPRQWAPVYADLPLGLKRRRHASPSLQFSFMGPKLYVNTVKVICCAVKSGHAVDQLRKFSCLWNFHCRNGNCGE

SEQ ID NO: 245 - protein, 628 aa, Platycerium bifurcatum
MASAKEAAALAAVEALGCGFDLTSDYRLKYKKGSLLELQHSHNKDLTIPGCITIPDVSRGIKCDKGEHMRFTSEVMQFQQMSQWFNQNASVEGKIPLGLFNAMFDLSGSWQDDANRLKNLAFDGCFITLYKLHLTRSNLVLREEVKNDIPSVWDPKSLAKFIEKYGTHIIVSASVGGQDVLYLKENYSSLISAQEIRKKLKSAGDEYFSETSGKRNADFKHSETSPLNSQPFRGTIAAGDEYFSETSGKRNADFKHSETSPLNSQPFRGTIAGSAQLLISNKDYTLISQRRGGYYFAKTHCEWQETVNMYPEAISLSFIPITSLLLGAVGSGFLQHAINLYLRYKPPVSDLQYFLDFQVPRQWIPVHNELPLRLARKQAFSPSLQFSLMSPKLYIDNNEVVVSRKPVTGIRLYLEGRKNNRLAIHLQHLSVLPQSLGKFWSEGIQIEAPLWNGSSDAPNEWFEPVEWKCFSHVCTQPIKYKPEWSNEQGSAFVVTGAQLGVKAHGLKSVLHLHLLFSKIPGCSIQRSRWDQHPAAEKTGFFSSISTTFSTTTKAGKKGPPVVVDSAVYMGGPPRPIQSPKLLKFVDTAELTKGPQDAPGHWVVTAARLELDRGKIAIKVKFSLLNYAE

SEQ ID NO: 246 - protein, 608 aa, Polystichium tsus-simense
MAFKHDIPNAAEVANIAIQSLGRGYDLTCDLRFSTCKDVNGTPLIELRNNETLELSLPGGVVVANVPAIVKCDKGERTRFRSDILTFDQMSQQFNQGLSLSGKIPCGLFNYMFNFTGSWQKDASTTRHLALDGWFYTLYTVEIPRSQLVLKEDIKASVPTSWEPAALARFIETFGTHLIVGIKIGGKDVVYMKQHQSSPSTSVDFQKLLAEVSDERFLQTEGRVSVGSKDSRSNKKRSIEFQSWSAHLDTFSQIIHNEKHHVTIIPRRKGGFDHGQSHSEWIHTVPLAPDVISVSLIPITFLLNGVAGSGFLSHAVNLYSRYKPPIEELRQFFEFQLPHEWAPVFNELPLTLSRRENSPSTLQFTLMGPKLKVSKLQVTVGKKPVTGMRLFLEGKRCDKLAVHLQHLSAIPRFLRSLWEDHPFAREVTWQDPDDYSTKYFEPVQWKNFSHVCTAPVENTETWIGDHAGASVVVGAQLAVKSFGLRNVLYLRLLYSKIPEAKIRRSEWDHMPASTQKSGMFSSFLSTTFSSTPVPTKGPAVVINSGIYPEGPPKPVHDPKLLKFVDTTEMTKGPQDMPGHWLVTGAKLYLDKRKISLRVKYSLLTVRSD

SEQ ID NO: 247 - protein, 284 aa, Nephrolepis exaltata (compacta)
MASKLDIPNAAKVANIAIQSLGRGYDLTCDLRFSTFKDVNGASLIELRNNETLELSLPGGVVVTNVPAIVKCDKGEQTHFRSDIVTFDQMSQQFNQGLSLSGKIPSGLFNYMFNFTGSWQKDASTTRHLALDGWFYTLYTVEIPRSQLVLKEDIKASVPTSWEAAALARFIETFGTHIIVGAKIGGKDVVYMKQHQSSPSTSIDFQKLLAEVSDERFAQTEGRTSVGSKDGRINKKKRGIEIQSWAAHLDTFSQLRCQMNDLHRLKVVPVWAQRMAALIKKSVA

SEQ ID NO: 248 - protein, 619 aa, Verbascum chaixii (Vill)
MAYYGHSNARLDAKAAAEKAVSVIGFGYDLTSDIRLSACKPGPSGSGLIELERSRTKDLVVPGNVVVSNVSGSIKCDKGERTRFSSDALTFNQMSEHFNQELSLSGKIPSGLFNTMFGFKGCWQNDASTSKILAFDGWLISLYTIELERSQITLSDKVKQEVPSTWDPPALAEFIEKYGTHVIVGVKMGGKDAIHIKQLKNSNLQPTEVQKLLKQLADKEFSEDENGNPIADPDTSPGKSKVQQSMIWDLHIPFASTMRPSVVSHSKNDDLLSIHIRRGGLDSGQSHNKWLSTVSQYPNVISMSFVPIGSLLSGIRGSGFLSHAINLYVRYKPPLEELTQFLEYQLPRQWAPAYNDLPLGPCLRKKASPSLQFTLLGPKLYVNTIKVDTANRPVTGLRLYLEGKRSDHLAIHLQHLSTLPQSLQLSPDHTYDPGDDSIDRGYFEPVKWSIFSHICTAPVEYHGARIDDSASIVTKAWFEVKGVGMKKVLFLRLGFSMVASAIIRRSEWDGPTSTSKKSGLISMLMSTPFSTALNNNNNQTDKLNKINLNSAVYPGGPPSPAKAPKMSHFVDMKEMVRGPEEPPGYWVVTGAKLCVEMGMIRIKVKYSLLTIVSDESLLM

SEQ ID NO: 249 - protein, 420 aa, Colysis wrightii (Ching)
MKQHQSSPSTSIDFQKLLSEVSDERFLHTEGRTSVGSKDSRSNKKHNIEFQSWSAHLDTFSQNIYNDKKHHVTIMPRRKGGFDHGQGHSDWIHTVPLAPDVISVSLIPITFLLHGVAGSGFLSHAVNLYLRYNPPIEELRQFLEFQLPREWAPVYSELPLTLPRREPSLSTLQFSLLGPKLKVCKLEVAVGKKPVTGMRLFLEGKRCDKLAVHLQHLSAIPRFLQPLWEDHPFAKEVTWQDPDDYSTKYFEPVQWKNFSHVCTAPVENTETWIGDHAGASVVVGAQLAVKSFGLRNVLYLRLLYSKIPEAKIRRSEWDHMPALAQKSGMFSSFLSTTFSSTPALPKAPAVVINSGIYPEGPPKPVRDPKLLKFVDTTEMTKGPQDMPGHWLVTGAKLYLDKRKISLRVKYSLLTVSSDCP

SEQ ID NO: 250 - protein, 609 aa, Nephrolepis exaltata (compacta)
MASKLDIPNAAKVANIAIQSLGRGYDLTCDLRFSTFKDVNGASLIELRNNETLELSLPGGVVVTNVPAIVKCDKGEQTHFRSDIVTFDQMSQQFNQGLSLSGKIPSGLFNYMFNFTGSWQKDASTTRHLALDGWFYTLYTVEIPRSQLVLKEDIKASVPTSWEAAALARFIETFGTHIIVGAKIGGKDVVYMKQHQSSPSTSIDFQKLLAEVSDERFAQTEGRTSVGSKDGRINKKKRGIEIQSWAAHLDTFSQITYNEKHHVTIIPRRKGGFDHGQSHSDWIHTVPLAPDIISVSLIPITSLLHGVSGSGFLSHAVNLYLRYKPPIEELRQFLEFQFPREWAPVFSELPLTLSRREHSVSTLQFTLMGPKLKVSKLQVTVGKKPVTGMRLFLEGKRCDKLAIHLQHLSAIPRFLQPLWEDHPFAREVTWQDPDDCSTKYFEPVQWKNFSHVCTAPVENMETWIGDHAGACVVIGAQLAVKSFGLKNVLYLRLLYSKIPEAKIRRSEWDHMPASTQKSGMFSSFLSSTFSSAPAPAKVPAVVINSGIYSEGPPKPVRDPKLLKFVDTTEMTKGPQDMPGHWLVTGAKLYLDKGKISLRVKYSLLTVSSD

SEQ ID NO: 251 - protein, 640 aa, Asplenium australasicum
MASAVGRFAATQAQSSEAAQPQITSSPAFSIAQQAVDALGRGYDVNFDLRLGYCKQRKHLIENDELGPTQDLLLPGNISIPNLPASIKCDKGDRTRFTTEILTFNEMSEQFNQDLSISGKIPTGHFNTMFNFSGSWQKDASQVKTLALDGFFINLYTVELPRAQLTLKEEVRAAVPSSWDPAALASFVEKYGTHVIVGVKIGGKDVICLRQHHSSQLSAVGVQKILEAKAKERFTSIAGGTSRENNKGKIRDGFTYGSNAMIAVNGSKDGVHPSWLNSSLSDLPPVETDDVKVMFKRKGGKAVSQSHEEWLHTVPSSPDIVSMSFVPITSLLNGVTGTGFLSHAINHYLRYKPPIDQLRHFLEFQLPKDWAPAFGDLPLGPPRKQQASPSLQFRLMGPKLQVNTMPVVVGKRCVTGIRLHLEGKKSNRLAIHLQYLTAVPQILQGLWEDHRPDNWEGPDTDFSRYFEPVMWRSFSHVCTAPVESKEPWVDEMKGEPVLKGALVVTGAQLDVQQHGSKKVLFLRLLYSKIRKVRIRRSEWDHTPASQQRSGIFSTLISTHFSSAPSPLSKPVQVNSAIYPDGPPLANSQAPKLLKFVDTSAMTRGPLDLPGHWLVTGAKLDVERGKIAVRAKYSLLLYGAD

SEQ ID NO: 252 - protein, 412 aa, Waldsteinia ternata
MALPAYRMDPQAAAEKAVAAIGSGYDLCLDLRLTSCKSGLVDLDPTRTRDLVLPGGAVVSDVSTSIKCDKGERTKFRSDVVSFNQMSEQYNKELSLSGKIPSGLFNAMFNYSGCWQKDAAPTKYLAFDGWLITLYSIELARSQLRLSEQVKRDVPSLWDPAALAAFIEKYGTHIIVGVKMGGKDIVHIKQLQNSKLEPAELQRRLKQVAEERFSDDANETSASNPTADLFGMMKDDNPLHWDIQRTLASSIKPPIVTHSMDDDVVTISVRRGGVDIGQSHNQWLSTISQAPNVISMSFVPITSLLGGTQGNGFLIHAVNLYLRYKPPIEELQQFLEFQLPRQWAPVYADLPLGLKRRRHASPSLQFSFMGPKLYVNTVKVICCAVKSGHAVDQLRKFSCLWNFHCRNGNCGE

SEQ ID NO: 253 - protein, 534 aa, Aglaomorpha (Roberts)
MSEQFNQNLAMSGKIPVGHFNSMFGFSGSWQRDASAVKTLAMDGVFITLYSVELPRAQLTLKEEVKAAVPSSWDPAALASFLEKYGTHVIVGVKIGGKDVICLKQHRTSSMSAVGVQKILEAKGKERFSSIEGSAAKEKINKGKIRDGSPFGSNGMNAVNGSKDLPWMSDSSTEYSTVETDDVTVIFKRKGGRDLSQSHEEWLRTVPSFPDIVSMSFVPITSLLNGVTGTGFLNHAINHYLRYKPPIQELHHFLEFQLPKEWAPAFGDLPLGPPRKQAGSPSLQFRLMGPKLQVNTTPVVIGKRCVTGLRLHLEGKKSNRLAIHLQYLTVVPQILQQLWQDDQPEEWEGPDDDFSKYFEPVMWKSFSHVCTAPVESTETWEDEGKGGPGSKGAQVVTGAQLDVLHCGSKKVLFLKLLYSRIHKTKIRRSEWDHTSASQQKSGIFSTLMSTTFSSAQAAPQKPVQVVVNSAIYPQGPPAANSQAPKLLKFVDTSEMTRGPLDLPGHWLVTGAKLFVDRGKIAVRAKYSLLLYSVD

SEQ ID NO: 254 - protein, 432 aa, Phormium (Lancer Terra Cotta)
MRPTDLMTPEAAAAAAVSAVGYGYDLVGDLRLSSCKAGPSGSRLIKIDDALVHDLVLPGGVVVPNVPKEIRCDKGERTRFRSDVLGFHQMAEQFNQDLSLSGKIPSGLFNAMFDFRGCWQKDLSSTKSLAFDGWFITLYSIELAKSHIVLQDKIKQEIPSSWDPVALAEFIEKYGTHIIVGIKMGGKDAVSIKQLQESALQQTEVQNLLKNLADDAFSEDFNANILLGAAEISKRLKGIKLANQENNAAVLKSMNSSIVTHLKKDDIVSIHVRRGGINTKQSHNQWLSTISQAPNVISMSFVPITSLLTGVRGSGFLSHAVNLYLRYKPPIEELHHFLEFQLPRQWAPVFNEIPLGPQHRKRRRLPSLQFTLMGPRLHVNTDKVTSSCLEDAYSQYIGSPLVSPRITKAVFQMTNDIIVQVILIMELLFFAN

SEQ ID NO: 255 - protein, 391 aa, Pteris cretica (roweri)
MSSMAIARETARSSALAVVESLGCGFDLTSDYRLKYRKGPLLELQHNSTKDLTIPGGITIPDVSRDIKWDKGERTRFASEVMQFQQMSQWFNQNASVEGKVPLGLFNAMFDLSGSWQDDASQIKNLAFDGCFITLYKLHLTRSNLVLREDVKNDIPSVWDPQGLARFIEKYGTHLIVSANVGGQDVLYLKENQASLLPSQDLHKQLKAAADDYFSDKVGERNQNFKDSETFPLNGLKDQSSAAVIAHLHSPQLLISNKDFTIISQRRGGHYACKTHLEWQETVNVFPEAISLSFVPITSLLLGVAGSGFLQHAINLYLRYKPPVGDIQYFLDFQVPRQWIPSHNELPLRLARKQAFSPSLQFRFIGPKLYINNNEVVVDRKPVTGHYNSGS

SEQ ID NO: 256 - protein, 603 aa, Hedera helix (Galaxy)
MALKLPAPEAAKIAIQSIGCGYDISLDLRLKYCKRDSTNPRLIEIHEDQGKEIVLPGGILIPNVSKAIKCDKGERTRFRSDVLSFQQMSEQFNQEMSLTGKIPSGVFNAMFEFTGSWQKDAAHTKTLAFDGLFITLYTVALDKSQMVLSDHVKKDVPSSWDPAALARFIKKYGTHIIVGVKMGGKDVIYMKQQHSSSLQPSDVQKWLKTIADKRFVDASGQYGMDSEQTYQNDKFQIREQRLRFADISPSSSYSYKEDIVSICKRRGGSDNKNLTHNEWLHSVQLEPDVISMSFIPITSLLNGVSGSGFLSHAINIYLRYKPPVEELHQFFEFQLPRQWAPVFSDLPLGPQRRQQSTSSLQFSFMGPKLYVNTTPVNVGKRPVTGLRLYLEGKRSNRLAMHMQHLSSLPKIFQLEDDPNGNFRQESYDRRYYEKVQWKYFSHICTAPVESDEDLSIVTGAQLEVGDYGFKRVLFLRLRFSTVIGAVAVKHPEWDGSPGLARKSGLISTLISHHFTAAQKPPPQPADVNINSAIYPGGPPGPAKAPKLLKFVDTTEMTRGPQDSPGYWVVSGARLMVENGRISLRVKYSLLAVILPDEEQPEES

SEQ ID NO: 257 - protein, 639 aa, Blechnum brasiliense
MASAVGGLAAMQAQSSEGAPLQNTASLAFSVAQQAVDALGRGYDVNSDLWLRYCKRGERLIENDNSGPTQDLLLPGNIIIPNVSTSIKCDKGDRMRFTSDVLTFSEMSEQFNQNLSISGKIPVGHFNAMFGFSGSWQKDASQVKTLAMDGVFINLYSVELPRAQLTLKEEVRAAVPSSWDPAALASFLEKYGTHVIVGVKIGGKDMICLKQHRSSTLPAVGVQKILEAKAKERFSSVEGSAAKEKINKGKIRDGSAHEANGMNAVFGSKDGMPLSWMNDTAPDLENDDVTVICKRKGGKDISQSHDEWLDTVPSTPDIVSMSFVPITSLLNGVTGTGFLTHAINHYLRYKPPIQELHHFLEFQLPKEWAPAFGDLPLGPPRKQQGSPSLQFRLMGPKLQVNTTPVVIGKRCVTGLRLHLEGKKSNRLALHLQYLTVVPQILQRLWEDDQAEEWEGPDDDFGKYFEPVMWKSFSHVCTAPVESNEIWVDEAKGEHGPKGALVVTGAQLDVEQHGSKKVLFLRLLYSKIHKAKIRRSEWDHTPASQQKSGIFSSLMSTTFTAQAAPVKPAHVDINSAIYPQGPPPAKSQAPKLLKYVDTTEMTRGPLDLPGHWLVTGAKLFVDRGKIAVRAKYSLLLYSVD

SEQ ID NO: 258 - protein, 596 aa, Sphaeropteris cooperi
MGSEAAARKVALDAVQSLGRGFDVTADFRTKFCKKRLVHIVNDGLESLTLPGDITIDAPSVIKCDKGECTRHTSDLMQFQQMSQAFNKRALIDGKIPLGHFNAMYDFTGSWFEDAMQTKNLAFDGKFITLFQLQLTSSLLLRKEVKNAVPSAWEPAALARFISLYGTHIVVRVSVGGQDVLYLKENASSMMSSADVHKLLKEFGDQMFAKKGGQKMQDGNHLSRRSIAPDETMYVDGTKSLFKNKDVTIFTKMRGGLLSAKTPTQWQATVTSTPDVIMMSFVPITSLLSGTPGSGFLNHAINLYLRYKPPIEDIRCFLEFQVPRQWAPVYSDLPLGPPQRAITLPSLQFCLMGPRLYVNTAQISVGRKPVTGLRLYLEGRQNNRLAIHLQHLASLPRVLEPYWNPEIHEQSNWHGSDNVESSEWFEHVQCRTFSHVCTARVKYNPVWTRSKSGVFVVTGAQLEVKSYGLKNVLHLRLQFSRIPGCTILKSRWYQPCSSNLSEKSRFFSTLSTAFTSHMVKKPVQPSPVVVDSGVFLGEPPIPIQQPKLLRFVDTRELTKGPQDMPGHWLVIGAQLDVDGGKISLNAKYSLLNFDFK

SEQ ID NO: 259 - protein, 603 aa, Tupidanthus calyptratus
MALKLPAPEAAKIAIQSIGCGYDICLDLRLKYRKRDSTNLSLIEIHEDQEKEIVLPGGILIPNVSKAIKCDKGEHARFRSDVLSFQQMSEQFNQEMSLTGKIPSGVFNTMFEFTGSWQKDAAHTKTLAFDGLFITLYTVALDKSQMVLSDHVKKAVPSSWDPAALARFIEKFGTHIIVGVKMGGKDVIYMKQQHSSSLQPSDVQKRLKTIADKRFVDASGQYGMDSEQTHQNDKFQIREQRLRFADTSPSSSYSYKEDIVIICKRRGGSDNKNLTHNEWLHNVQLEPDVISMSFIPITSLLNGVSGSGFLSHAINLYLRYKPPVEELHQFLEFQLPRQWAPVFSDLPLGPQRRQQSTSSLQFSLMGPKLYVNTTPVDVGKRPVTGLRLYLEGKRSNRLAMHMQHLSSLPKVFQLKDDPNGNFRQESYDHRYYEKVQWKNFSHICTAPVESDEDLSIVTGAQLEVGDYGFKRVLFLRLRFSTVLGAVAVKHPEWDGSPGLARKSGLISTLISHHFTATLKPPPQPADVNINSAIYPGGPPAPTQSAKLLKFVDTTEMTRGPQETPGYWVVSGARLMVEKGRISLRVKYSLLTVILPDEEALEEP

SEQ ID NO: 260 - protein, 597 aa, Tupidanthus calyptratus
MALKVSAPEAAKIAIQSIGCGYDISLDLRLKCCKGDPANPRLIEIHEDQGREIVLPGGIVIPNVSKAIKCDKGEHARFRSDVLSFQQMSEQFNQEMSLTGKIPSGVFNTMFEFTGSWQKDAANTKTLAFDGVFITLYTVALEKTQMILSDHVKQAVPSSWDPAALARFIEKFGTHIIVGVKMGGKDVIYMKQQHSSSLQPSDVQKRLKTIADKRFVDASGQYGMDSEQTHQNDKFQIREQRLRFADTSPSSSYSYKEDIVIICKRRGGSDNKNLTHNEWLHNVQLEPDVISMSFIPITSLLNGVSGSGFLSHAINLYLRYKPPVEELHQFLEFQLPRQWAPVFSDLPLGPQRRQQSTSSLQFSLMGPKLYVNTTPVDVGKRPVTGLRLYLEGKRSNRLAMHMQHLSSLPKVFQLKDDPNGNFRQESYDRRYYEKVQWKNFSHICTAPVESDEDLSIVTGAQLEVGDYGFKRVLFLRLRFSTVLGAVAVKHPEWDGSPGLARKSGLISTLISHHFTATLKPPPQPADVNINSAVYPGDPPGPAQAPKLLKFVDTTEMTRGPQDSPGYWVVSGARLMVEKGRISLRVKYSLLAAILPDE

SEQ ID NO: 261 - protein, 635 aa, Adiantum pedatum
MHPQSSELATSLPPSNSRAFSVAHQAVEALGRGYDVTCDLWLSYCKRGERLIANDNRSSTQDLYLPGNIIIPNVATSVKCDKGDRTRMTTDVLTFNEMSERFNQDLAISGKIPLGHFNAMFNLSGSWQKDASSVKSLSMNGVFINLYSVELPRTQLTLKEEVRAAVPSSWDPTALASFVEKYGTHVIVGVKIGGKDVICIKQHSTSSLSAVGVQKILEAKSKERFLSVDGNMSREKMNKGKIRDGSVLGANGTNAYRDAHKSGAPLPWMNDSSADSTIETDEVTVIFKRKGGWDSSQSHDEWLQTVPSAPDIVSMSFVPITSLLNGVTGTGFLSHAINLYLRYKPTIQELHHFLEFQLPKEWAPAYGDFPLGPPRKQHGSPSLQFRPLGPKLQVNTTPVVVGKRCVTGARLHLEGKKGNRLAIHLQYLTVVPKLLQQTWEDDQPEVWEGPDSNFAKYFEPVMWKSFSHVCTAPVESTEIWDDDGKGEQGGPRGALVVTGAQLDVQQHGSKKVLFLKVLYSKIQGASIRRSEWDHTPASQQRSGIFSTLISTPFSSPQATPLKPVQVVVNSAIYPQGPPPTNSQAPKLLKFVDSTEMTRGPVDSPGHWLVTGAKLFVDRGKIAVRVKYSLLLYSME

SEQ ID NO: 262 - protein, 353 aa, Platycerium wandae
MASKLDIPNAAKVAHLAIQSLGRGYDLTCDLRFSSFKDRNGTSLIELRNDETVKLSLPGGVVIADVPAIMKCDKGERTRFQSDILTFEQMCQQFNQGLSLSGKVPCGLFNNVFNFTGSWQKDASTTKHLALDGWFYTLYTIEMPRSQLVLKENIKSSVPTYWEPAALARFIETFGTHIIVGVQIGGKDVVYMKQHQTSPSTPIEFQKLLTEVSNERFLQTEGRASIGSKDSRSNKKRNVEFQSWSAHLDTFSQMIYNEKHHVTIIPRRKGGFDHGQSHSEWIHTVPLAPDVISVSLIPITFLLHGVAGSGFLSHAVNLYLRFFLQIIHLLKSCASFWNFSSPVHGPQFTVNCL

SEQ ID NO: 263 - protein, 296 aa, Platycerium bifurcatum
MASAKEAAALAAVEALGCGFDLTSDYRLKYKKGSLLELQHSHNKDLTIPGCITIPDVSRGIKCDKGEHMRFTSEVMQFQQMSQWFNQNASVEGKIPLGLFNAMFDLSGSWQDDANRLKNLAFDGCFITLYKLHLTRSNLVLREEVKNDIPSVWDPKSLAKFIEKYGTHIIVSASVGGQDVLYLKENYSSLISAQEIRKKLKSAGDEYFSETSGKRNADFKHSETSPLNSQPFRGTIAGSAQLLISNKDYTLISQRRGGYYFAKTHCEWQRTTSHFQQGLYSDFSKARRILFCEDPL

SEQ ID NO: 264 - protein, 601 aa, Lygodium flexuosum
MSRGSTATNTGGRYVNPWGYPAIEALGCGFDVTANYRLKYCKCPVVQLPQTLVEDMLIPGGITILNVPRDITCDKGEMVRFTSEVMEFQQMSQWFNKNSSIEGKIPLGYFNAMFDLSGSWPDDATQTKSLAFDGFFITLYKLQLSRINLVLREEVLSDIPSTWDPKSLAQFIEKYGTHVIVAVNIGGQDVLYLKENRSSSLSAKEIQQHLKLAGDSCFTDGGNNRTLVSKENEMYSLTSQASVAMHSAQLFITNKDVTIIGRRRGGNPLSKSHNEWQDTVSSSPDAISMSFVPITSLITGVSGSGFLQHAINLYLRYKPPIEDLRHFLDFQVPRQWIPEYSELPLGLLRMRGITPSLQFSLLGPRLYVNTTEVTVSRKPVTGIRLYLEGKRSNRLAIHLQHLSVLPRTLDQFWNEEIHIEQPKWHGSDGSDKKWFEPVQWKSFSHVCIEPIKFQPEWQNGKDGVFVVTGAKLEVKSYGLKSILHLRLLFTKIPGCMIQASRWDQPPASQKSNFFSSLTSTFSSTTKAVKRGSPAVLVDSAVYPGGPPKPVQSSKLLKFVDTTELTRGPQDIPGHWIVTAAKLELDCQKISLRVKYSLLNFM

SEQ ID NO: 265 - protein, 600 aa, Vernonia noveboracensis
MSQKLVENAIDSLGKGFDLTSDFRLKYCKGKERLVLLNENRSKELLVPGFGSFKEVSPDIKCDKGDRVRFQSDILDFNQMSEFFNKKCSVPGKIPTGLFNSMFGFQSGSWATDAANTKSLGLDGYFIMLFNVHLDRYPLVLSDEVLNAVPSTWDPPALARFIEKYGTHVVVGLGIGGRDVILLKQSKSSKLDSSQLKKHLEDLGDQLFNGSCTFSPHQLKTKEHKNKTPSAFNTIFDPEPMLFNGFSSTTQKDGLTIMCSKRGGDLTSTTHCEWLLTVPSMPDAINFDFIPITSLLPGVPGKGFLSHAINLYLRYKPPIADLEYFLDFQAHKIWAPVHNDLSLGPTTNRAIRDTSLNFNLMGPKLYVNTTQVTITKKPVTGMRLYLEGMKSNRLAIHLQHLSETPVLFRDKLGEALHWRGSEEIEDPRFFEPIQWKKFSHVCTASVKYNPEWSVPGKEASFIVTGAQLHVKKHNSKSVLHLRLLYSRVSSSCVVQSSWTLGPLNQSQRSGFLSAISTTLSVNGNPEKELKSSDVVVDSGIYPKGPPVEVPTPKLLKFVDMTQVCKGPRDNPGHWLVTGAKLDLTKGKIRLLVKFSLLNIC

SEQ ID NO: 266 - protein, 601 aa, Tupidanthus calyptratus
MALKLPAPEAAKIAIQSIGCGYDICLDLRLKYRKRDSTNLSLIEIHEDQEKEIVLPGGILIPNVSKAIKCDKGEHARFRSDVLSFQQMSEQFNQEMSLTGKIPSGVFNTMFEFTGSWQKDAAHTKTLAFDGLFITLYTVALDKSQMVLSDHVKKAVPSSWDPAALARFIEKFGTHIIVGVKMGGKDVIYMKQQHSSSLQPSDVQKRLKTIADKRFVDASGQYGMDSEQTHQNDKFQIREQRLRFADTSPSSSYSYKEDIVIICKRRGGSDNKNLTHNEWLHNVQLEPDVISMSFIPITSLLNGVSGSGFLSHAINLYLRYKPPVEELHQFLEFQLPRQWAPVFSDLPLGPQRRQQSTSSLQFSLMGPKLYVNTTPVDVGKRPVTGLRLYLEGKRSNRLAMHMQHLSSLPKVFQLKDDPNGNFRQESYDRRYYEKVQWKNFSHICTAPVESDEDLSIVTGAQLEVGDYGFKRVLFLRLRFSTVLGAVAVKHPEWDGSPGLARKSGLISTLISHHFTATLKPPPQPADVNINSAIYPGGPPAPTQSAKLLKFVDTTEMTRGPQETPGYWVVAGARLMVEKGRISLRVKYSLLTVMLPDEEALE

SEQ ID NO: 267 - protein, 608 aa, Platycerium wandae
MASKLDIPNAAKVAHLAIQSLGRGYDLTCDLRFSSFKDRNGTSLIQLRNDETIKLSLPGGVIVADVPAIVKCDKGERTRFQSDILSFDQMCQQFNQGLSLSGKVPCGLFNNMFNFSGSWQKDASTTKHLALDGWFYTLYTVEMPRSKLVLKENIKSLVPTSWEPAALARFIETFGTHIIVGVKIGGKDVVYMRQHQSSPSTPIEFQKLLTEVSNERFLQTEGRASMGSKDSRSHKKRNIEFQSWSAHLDTFSQMIYNEKHHITIIPRRKGGFDHGQSHSEWIHTVPLTPDVISVSLIPITFLLHGVAGSGFLSHAVNLYLRYNPPIEELRQFLEFQLPRVWAPVYGELPLTLPRREPSLPTLQFSLMGPKLKVSKLEVAVGKKPVTGLRLFLEGKRCNKLAIHLQHLSAIPKFLQPLWENHPFAREVTWQDPDDYSTKYFEPVQWKNFSHVCTAPVENTETWIGDHAGASVVVGAQLAVKSFGLRNVLYLRLLYSKIPEAKIRRSEWDHMPALTQKSGMFSSFLSTTFSSTPAPPKVPAVVINSGIYSEGPPNPVRDPKLLKFVDTTEMTKGPQDMPGHWLVTGAKLYLDKRKISLRVKYSLLTVNSD

SEQ ID NO: 268 - protein, 559 aa, Asplenium prolongatum x Asplenium antiquum (Kurata)
MPASIKCDKGERTRFTTEVLTFNEMSEQFNQDLSISGKIPTGHFNNMFDFSGSWQKDASQVKTLALDGFFINLYTVELPRAQLTLKEEVRAAVPSSWDPVALASFVEKYGTHVIVGVKIGGKDVICLRQHHSSQLSAVGVQKILEAKAKERFTYIVGGTSKEKINKGKIRDGFSYGSDVMNAVNGSKDGLSLSWMNDSLSDLLTVETADVKVMFKRKGGKDVSQSHEEWLHTVPAAPDIVSMSFVPITSLLNGVTGTGFLSHAINHYLRYKPPIDQFRHFLEFQLPKDWAPAFGDLPLGPPRKQQASPSLQFRLMGPKLQVNTTPVMVGKRCVTGVRLHLEGKKSNRLAIHLQYLTVVPQILQSRWEDDQLENWEGPDTDFSKYFEPVLWRSFSHVCTAPVESKEPWVDEMRGEPVLKGALVVTGAQLDVEQHGSKKVLFLRLLYSKIHKAASRRSEWEHTPASSQRSGIFSTLMSTPFSSAASSPTKPVHVNSAIYPDGPPPANSQAPKLLKFVDTSEMTRGPLDLPGHWLVTGAKLCVERGKIAVRAKYSLLLYSED

SEQ ID NO: 269 - protein, 598 aa, Verbascum chaixii (Vill)
MALKLPAEEAAKVAIHSIGRGYDISLDLRLKYCKGDSSLIEIDEDHSREIVLPGGITIPNVSKSIKCDKGERTRFRSDVLTFQQMSEQLNQELALTGKIPSGLFNAMFEFSGCWQKDAAYTKTLSFDGMFITLYTVALEKSHMVLRDHVKKEVPSSWDPASLARFINKFGTHVIVGLKMGGKDVIYMKQQHSSSLQSADVQKRLKAMADKRFLDANEQSELNSEQLYQSGKFEMKESRLRFADTGTSSSYSHKDDIVSICKRRGGIDGRNLNHNEWLQTVQLEPDVISMSFIPITSLLNGVSGSGYLSHAINLYLRYKPPIEELHQFLEFQLPRQWAPVFSDLPLGPQRRQQSTASLQFSLLGPKLFVNTSAVDVGKRPVTGLRLYLEGRRSNRLAIHLQHLSSLPNIFQLEDDPNGNFPQESHDRRYYEKVQWKNFSHVCTAPVESDEELSIVTGAQLHVGDYGFKKVLFLRLRFSSVIGAVSVKYPEWDGSPGLARKSGLISTLISHHFTAVQKPPPHLADVNINSAVYPGGPPVPIQTSKLLKFVDTTEMTRGPQDPPGYWVVSGARLVVEKGRISIRVKYSLLTVVQPDDDVSE

SEQ ID NO: 270 - protein, 640 aa, Bolbitis cladorrhizans
MASSGGRLAALHPQSSEAAPRQNMSSLALSVAEHAVDALGRGYDVNSDLWLRSKHCECLIEDDKSGATQNLHLPGNIVIPNVPASVKCDKGDRTRFTSDILSFNEMSEQFNQTLSISGKIPVGHFNAMFNFTGSWQKDASQFKALAMDGVFINLYSVELPRTQLTLKEEVRAAVPSSWDPAALASFVEKYGTHVIVGVKIGGKDVICLKQHRSSSLSTVGVQKILESQAKERFSSVDSRAGKEKINKGKIRDGGSPFGSNGINAVHGLKDLSLISNSSSDSSKVETDDVIMIFTRKAGRNVSASHEEWLHTVASAPDIVSMSFVPITSLLNGVTGTGFLSHAINHYLRYKPPIQELRHFLEFQLPKEWAPAFGDLPLGPPRKQQASPSLQFRPMGPKLQVNTTPVVIGKRCVTGLRLHLEGKKGNRLAVHLQYLTVVPQILQRLWDDDQPEEWEGPDDDFSKYFEPVMWKSFSHVCTAPVEGNDTWEDEGKGEPGPKGALVVTGARLDVEHCGSKKVLFLRLLYSKIHKAKIRRSEWDDTPASQQKSGIFSTLMSTTFSSAQSAPQKPVQVVVNSAIYPEGPPPAKSQVPKLLKFVDTTEMTRGPLNLPGHWLVTGAKLFVDRGKITVRAKYSLLLYIVD

SEQ ID NO: 271 - protein, 646 aa, Platycerium wandae
MASAKEAAALAAVEALGCGFDLTSDYRLKYKKGSLLELQHSHNKDLTIPGCITIPDVSRGIKCDKGEHMRFTSEVMQFQQMSQWFNQNASVEGKIPLGLFNAMFDLSGSWQDDANRLKNLAFDGCFITLYKLHLTRSNLVLREEVKNDIPSVWDPKSLAKFIEKYGTHIIVSASVGGQDVLYLKENYSSLISAQEIRKKLKSAGDEYFSETSGKRNADFKHSETSPLNSQPFRGTIAGSAQLLISNKDYTLISQSAGDEYFSETSGKRNADFKHSETSPLNSQPFRGTIAGSAQLLISNKDYTLISQRRGGYYFAKTHCEWQETVNMYPEAISLSFIPITSLLLGAVGSGFLQHAINLYLRYKPPVSDLQYFLDYQVPRQWIPVHNELPLRLARKQAFSPSLQFSLMSPKLYIDNNEVVVSRKPVTGIRLYLEGRKNNRLAIHLQHLSVLPQSLGKFWSEGIQIEAPLWNGSSDAPNEWFEPVEWKCFSHVCTQPIKYKPEWSNEQGSAFVVTGAQLGVKAHGLKSVLHLHLLFSKIPGCSIQRSRWDQHPAAEKTGFFSSISTTFSTTTKAGKKGPPVVVDSAVYMGGPPRPIQSPKLLKFVDTAELTKGPQDAPGHWVVTAARLELDKGKIAIKVKFSLLNYAE

SEQ ID NO: 272 - protein, 317 aa, Tupidanthus calyptratus
MEGGEETVKPIGLRAMESLGLGFDFASDFRLKFAKRCPGAGGDDRLVVLDEASRRDVVFPGGGVIRGVPECIRCDKGDRIRFKSDVLKFNQMSELVNQKSSVQGKVPSGYFNAMFDLSGSWLNDAADANHLAFDGYFITLYCLHLTASPLVLRDKVKKSVPSHWNPASLSRFILTYGTHIIVGLAVGGQDVICVKQRPSSGIPPAELRGYLEDLGDCMFSDGRNPVLERKTRDGKQKVPEVFNRMLQSHTMQFSSITETSSKDGLTILSSKRGGDVFSQNHSNWLQTVASNPEAICFKLVPITSLLTGVPAVSALKS

SEQ ID NO: 273 - protein, 328 aa, Tupidanthus calyptratus
MEGGEETVKPIGLRAMESLGLGFDFASDFRLKFAKRCPGAGGDDRLVVLDEASRRDVVFPGGGVIRGVPECIRCDKGDRIRFKSDVLKFNQMSELVNQKSSVQGKVPSGYFNAMFDLSGSWFNDAADSNHLAFDGYFISLYYLHLIASPLVLRDKVKNSVPSHWNPASLSRFILTYGTHIIVGLAVGGQDVICVKQRPSSGIPPAELRGYLEDLGDCMFSDGRNPVLERKTRDGKQKVPEVFNRMLQSHTMQFSSITETSSKDGLTILSSKRGGDVFSQNHSNWLQTVASNPEAICFKLVPITSLLTGVPGSGYLSHAINLYLRCKCP

SEQ ID NO: 274 - protein, 392 aa, Verbascum chaixii (Vill)
MSDEIVKSALASLGKGFDLSSDFRLKYCKGDERLIMLNETHTRELKIPSFGSFNNVSIDIKCDKGDRTRYQSDILDFNQMSELFNHKCSIPGKIPSGRFNSMFGFQSGSWANDAGNTKYLGLDGYFIVLFDVHIDRYPLILADEVRNDVPSTWDPSALARFIEKYGTHIIVGISIGGEDVVLVKQDKSSNMEPSQLKNHLDNLGDQLFNGACTFPPHQFKNKEQKYKAPEAFNVFDPQPNIFSNFATITAKDGISVICSKMGGDTTVSTHCEWLLTVPSKPDAIHFNFIPITSLLRGIPGKGFLSHAINLYLRYKPPIADLKYFLDFQAHRIWAPIHNDLPLGPIRSKALQTPALHFNMMGPKLYVNTSQVTVGNTPVTGMRLYLEGMKCNR

SEQ ID NO: 275 - protein, 369 aa, Sphaeropteris cooperi
MGSEAAARKVALDAVQSLGRGFDVTADFRTKFCKKRLVHIVNDGLESLTLPGDITIDAPSVIKCDKGECTRHTSDLMQFQQMSQAFNKRALIDGKIPLGHFNAMYDFTGSWFEDAMQTKNLAFDGKFITLFQLQLTSSLLLRKEVKNAVPSAWEPAALARFISLYGTHIVVRVSVGGQDVLYLKENASSMMSSADVHKHLKNLGDQMFAEKGVQKIQDGNSLRGCSIAPVEIDGTNILYKSKDLTIIAKKRGGRLCAKTPSEWQATVMSAPDVIMMSFVPITALLSGTPGSGFLNHAINLYLRYKPPIEDIRCFLEFQVPRQWAPVYSDLPLGPPQRAITLPSLQFCLMGPRLYVNTAQGSLSLDYASI

SEQ ID NO: 276 - protein, 404 aa, Sphaeropteris cooperi
MMSSADVHKHLKNLGDQMFAEKGVQKIQDGNSLRGCSIAPVEIDGTNILYKSKDLTIIAKKRGGRLCAKTPSEWQATVMSAPDVIMMSFVPITALLSGTPGSGFLNHAINLYLRYKPPIEDIRCFLEFQVPRQWAPVYSDLPLGPPQRAITLPSLQFCLMGPRLYVNTAQISVGRKPVTGLRLYLEGRQNNRLAIHLQHLASLPRVLEPYWNPEIHEQSNWHGSDNVESSEWFEHVQCRTFSHVCTARVKYNPVWTRSKSGVFVVTGAQLEVKSYGLKNVLHLRLQFSRIPGCTILKSRWYQPCSSNLSEKSRFFSTLSTAFTSHMVKKPVQPSPVVVDSGVFLGEPPIPIQQPKLLRFVDTRELTKGPQDMPGHWLVIGAQLDVDGGKISLNAKYSLLNFDFK

SEQ ID NO: 277 - protein, 638 aa, Asplenium australasicum
MASAVGRFAATQAQSSEAAQPQITSSPAFSIAQQAVDALGRGYDVNFDLRLGYCKQRKHLIENDELGPTQDLLLPGNISIPNLPASIKCDKGDRTRFTTEILTFNEMSEQFNQDLSISGKIPTGHFNTMFNFSGSWQKDASQVKTLALDGFFINLYTVELPRAQLTLKEEVRAAVPTSWDPAALASFVKKYGTHVIVGVKIGGKDVVCLKQHHTSQLSTIRVQKILEEKAKERFTPIAGGTSKEKINKGKIRDGSPYGSNAMNGSKDGLSLSWMNDSLSDLLTVETDDVRVMFKRKGGKDVSQSHEEWLHTVPSSPDIVSMSFVPITSLLNGVTGTGFLSHAINHYLRYKPPIDQLRHFLEFQLPKDWAPAFGDLPLGPPRKQQASPSLQFRLMGPKLQVNTMPVVVGKRCVTGIRLHLEGKKSNRLAIHLQYLTAVPQILQGLWEDHRPDNWEGPDTDFSRYFEPVMWRSFSHVCTAPVESKEPWVDEMKGEPVLKGALVVTGAQLDVQQHGSKKVLFLRLLYSKIRKVRIRRSEWDHTPASQQRSGIFSTLISTHFSSAPSPLSKPVQVNSAIYPDGPPLANSQAPKLLKFVDTSAMTRGPLDLPGHWLVTGAKLCVERGKIAVRAKYSLLLYSED

SEQ ID NO: 278 - protein, 390 aa, Aglaomorpha (Roberts)
MASKLDIPNAATVAHLAIQSLGRGYDLTCDLRFSSFKDVNGASLIELRDSETIELSLPGGVVVANVPAIVKCDKGERTRFRSDILAFEQMSQQFNQGLSLSGKIPCGLFNNMFNFTGSWQKNSSNTKHLALDGWFYTLYNMEMPRSQLVLKEDIKASVPSSWEPVALARFIETFGTHIVVGVKVGGKDVVYMKQHQSSPSTSIEFQKLLAEVSDERFLRSEGRASVGSKDSRSNKKHNIEFQPWSAHLDTFSQMSYNEKHHVTIIPRRKGGFDHGQSHSEWIHTVPLAPDIISVSLIPITFLLHGVAGSGFLSHASNLYLRYKPPIEELRQFLEFQLPREWAPVYSELPLTLPRREPSLSTLQFTFMGPKLKVSKLEKCLLCRLQLGKSL

SEQ ID NO: 279 - protein, 368 aa, Tupidanthus calyptratus
MFSDGRNPVLERKTRDGKQKVPEVFNRMLQSHTMQFSSITETSSKDGLTILSSKRGGDVFSQSHSKWLQTVASNPEAISFKLVPITSLLTGVRGSGYLSHAINLYLRYKPIPEDLQYFLEFQVPRQWAPLFCEMPLGHQRRKASCPPLQFSFMGPKTRISSTLVTSGQKPVVGLRLFLEGKKCNHLAIHVQHLSSLPNIMAFACANSTISKPSQWRGSDDYESSDQFLEPVRWKRYSNVCSSVVKHDPNWIQGEEPGGAFIVTGAQLISKGKWPKTVLHLYLLFTYLPNCTIRKTEWAAAPETSRRSGFLTNLSTTFTFTQRDVADAPKQLPAALNSAIYPDGPPVPLSSGKLLKYVDVSEVVRGPHD

SEQ ID NO: 280 - protein, 544 aa, Matteuccia struthiopteris
MFREMSNVTKESASALPLSSYSFNRCLNGSIKMLLLKERFLLGFSMLCLICLDLGKMMQTNYRISPLMYTLSLYKLHLTRSHLVLREEVKNDIPSVWDPQSLAKFIEKYGTHIIVSASVGGQDVLYLKENYSSLLSTQDIHKKLKSAGDDYFSDRGGEKSANFKESETLPLNALSSQPFRATVAHIHSAQVLVTNKDFTIISQRRGGYHFAKTHCGWQETVNIFPEAISLSFVPITSLLVGVAGSGFLQHAINLYLRYKPPVSDIQYFLDFQVPRQWIPIHNELPLRLARKQTFSPSLQFSLTGPKLYINNNEVVVNRKPVTGIRLYLEGRKSNRLAIHLQHLSVLPQSLGQFWNEGTELESPWWNGSNDAPKEWFEPVEWKCFSHVCTQPIKYKPEWLNERGSAFVVTGARLEVKAHGLKNVLHLHLLFSKIPGCTIQRSRWGQHPAAEKTGFFSSISTTFSSTTKAGKKGPPVVVDSAVFIGGPPRPIQSPKLLKFVDTTELTKGPQDAPGHWVVTAARLELDRGKISVSVKFSLLNYADAE

SEQ ID NO: 281 - protein, 593 aa, Platycerium wandae
MASAKEAAALAAVEALGCGFDLTSDYRLKYKKGPLLELQHSHNKDLTIPGCITIPDVSRDIKCDKGEHMRFTSEVMQFQQMSQWFNQNASIEGKIPLGLFNAMFDLSGSWQDDANRVKNLAFDGCFITLYKLHLTTSNLVLQEEVKNDIPSVWDPKALAKFIEKYGTHIIVSASVGGQDVLYLKENYSSLLSAQEIRKKLKSAGDEYFSEISGKRNVDFKVNETSPLNSQPFRGTIAASAQLLISNKDYTLISQRRGGYHFAKTHCEWQDTVNMYPEAISLSFVPITSLLSGAAGSGFLQHAINLYLRYKPPVSDLQYFLDFQVPRQWIPVHNELPLRLARKQAFSPSLQFSLMSPKLYINNNEVVVNKKPVTGIRLFLEGRKNNRLAIHLQHLSVLPQSLGQFWSEGTQMEQPRWNGSNDAPNDWFEPVEWKCFSHVCTQPIKFKPEWSNEQGSAFVVTGARLDVKAHGLKSVLHLHLLFSRIPGCSIQRSRWDQHPAAEKTGFFSSISTTFSTTTKAGKKGPPVVVDSAVYMGGPPRPIQSPKLLKFVDTAELTKGPQDAPGHWVVTAARLELDKGKIAIKVKFSLLNYAE

SEQ ID NO: 282 - protein, 333 aa, Tupidanthus calyptratus
MFSDGRNPVLERKTRDGKQKVPEVFNRMLQSHTMQFSSITETSSKDGLTILSSKRGGDVFSQNHSNWLQTVASNPEAICFKLVPITSLLTGVPGSGYLSHAINLYLRYKPAPEDLRYFLEFQVPVQWAPLFCELPLRHQRRKASCPLLQFAFLGPKIHVSSTQVTSGEKPVVGLRLFLEGKKCNRMAIHAQHLSSLPNIMEFALSNSATSRPCQWRGSDDYISNDQFLEPVRWKRYSNVCSSVVEHDSNWIQGEEVGAFVVTGAQLISKGKWPKTILHLRLLFSYLPNCTIRKTEWAAAPEASQKSGFRLNLAQLSHSVSELVLMHQSSFQLH

SEQ ID NO: 283 - protein, 646 aa, Aglaomorpha (Roberts)
MASKLDIPNAATVAHLAIQSLGRGYDLTCDLRFSSFKDVNGASLIELRDSETIELSLPGGVVVANVPAIVKCDKGERTRFRSDILAFEQMSQQFNQGLSLSGKIPCGLFNNMFNFTGSWQKNSSNTKHLALDGWFYTLYNMEMPRSQLVLKEDIKASVPSSWEPVALARFIETFGTHIVVGVKVGGKDVVYMKQHQSSPSTSIEFQKLLAEVSDERFLRSEGRASVGSKDSRSNKKHNIEFQPWSAHLDTFSQMSYNEKHHVTIIPRRKGGFDHGQSHSEWIHTVPLAPDIISVSLIPITFLLHGVAGSGFLSHASNLYLRYKPPIEELRQFLEFQLPREWAPVYSELPLTLPRREPSLSTLQFTFMGPKLKVSKLEVAVGKKPVTGMRLFLEGKRCDKLAIHLQHLSAIPRFLQPLWEDHPFSREVTWQDPDDYSTKYFEPVQWKNFSHVCTAPVENTETWIGDHAGASVVVGAQLGVKSFGLRNVLYLRAPVENTETWIGDHAGASVVVGAQLGVKSFGLRNVLYLRLLYSKIPEAKIRRSEWDHMPALTQKSGMFSSFLSTTFTSTPAAPKAVVINSGIYPEGPPKPVRDPKLLKFVDTTEMTKGPQDMPGHWLVTGAKLYLDKRKISLRVKYSLLTVSSDGP

SEQ ID NO: 284 - protein, 639 aa, Blechnum cartilagineum (Sw)
MASAVGGLAAMQAQSSKGAPPQNMPSLAFQVAQQAVDALGRGYDVNSDLWLRYCKRGECLIENDNSVPTQDLLLPGNIIIPNVPTSIKCDKGDRTRFTSDVLTFSEMSEQFNQNLSISGKIPVGHFNAMFGFSGSWQKDASQVKTLAMDGVIINLYSVELPRAQLTLKEEVRAAVPSSWNPAALASFVEKYGTHVIVGVTIGGKDMICLKQHRSSSLSIVGVQKILEAKAKERFSSVEGSATKEKINKGKIRDGSTYESNGMNAVFGSKDGMPFSWMSDSVPEIENEDVTVIFKRKGGRDISLSHDKWLHTVPSAPDIVSMSFVPITSLLNGITGTGFLSHAINHYLRYKPPIQELRHFLEFQLPKEWAPAFGDLPLGPPRKQQGSPSLQFRLMGPKLQVNTTPVVIGKRCVTGLRLHLEGKKSNRLAVHLQYLTVVPQILQQLWEDDQPEEWEGPDDDVSKYFEPVMWKSFSHVCTAPVESNEIWVDEAKGEPGPKGAQVVTGAQLDVEQHGSKKVLFLRLLYSKIHKATIRRSEWDHTPASQQKSGIFSTLMSTPFSAQAAPVKPVQVVVNSAIYPQGPPPAKSQAPKLLKFVDTTEMTRGPLDLPGHWLVTGAKLFVDRGKIAVRAKYSLLLYSED

SEQ ID NO: 285 - protein, 638 aa, Asplenium australasicum
MASTVGGLAAMQAQSSEAAQPPNMSFTAFSIAQQAVDALGRGYNVNLDLSLSYCKQGKRLIEIDESGPTQDLLLPGNIIIPNMPASIKCDKGDRTRFTTEVLKFNEMSEQFNQNLSISGKIPTGHFNTMFNFSGSWQKDASQVKTLALDGFFINLYTVELPRAQLTLKEEVRAAVPTSWDPAALASFVKKYGTHVIVGVKIGGKDVVCLKQHHTSQLSTIRVQKILEEKAKERFTPIAGGTSKEKINKGKIRDGSPYGSNAMNGSKDGLSLSWMNDSLSDLLTVETDDVRVMFKRKGGKDVSQSHEEWLHTVPSSPDIVSMSFVPITSLLNGVTGTGFLSHAINHYLRYKPPIDQLRHFLEFQLPKDWAPAFGDLPLGPPRKQQASPSLQFRLMGPKLQVNTMPVVVGKRCVTGIRLHLEGKKSNRLAIHLQYLTAVPQILQGLWEDHRPDNWEGPDTDFSRYFEPVMWRSFSHVCTAPVESKEPWVDEMKGEPVLKGALVVTGAQLDVQQHGSKKVLFLRLLYSKIRKVRIRRSEWDHTPASQQRSGIFSTLISTHFSSAPSPLSKPVQVNSAIYPDGPPLANSQAPKLLKFVDTSAMTRGPLDLPGHWLVTGAKLDVERGKIAVRAKYSLLLYGAD

SEQ ID NO: 286 - protein, 339 aa, Hedera helix (Galaxy)
MSCSTSTSSGSGDGIVWRAINSMGKGFDLTSDFRLNYCKGNHTLVLLNQTHTRQLLVPGFGYFNHVSSDINCDKGDRTRYQSDILDFNQMSEFMNQRSSVPGKIPSGLFNSMFGFESESWAKEAGSTKCLGLDAYFISLFHLRINRYPLVLCDEVRNAVPSTWDPAALARFIEKYGTHIIVGLGIGGQDTVVVRQNKSSNLEASDLKKNLDQLGDQLFTGTCTFTPKHRNHKTPPAFNVFDHRSMLFDNFSSVKTKNGINVICSKRGGDVSAHTHCEWLLTVPSMPDAIQFSFIPITSLLKGVPGNGFLTHAINLYLRCRFNSSIISHYRHNFPNHNHL

SEQ ID NO: 287 - protein, 419 aa, Waldsteinia ternata
MALPAYRMDPQAAAEKAVAAIGSGYDLCLDLRLTSCKSGLVDLDPTRTRDLVLPGGAVVSDVSTSIKCDKGERTKFRSDVVSFNQMSEQYNKELSLSGKIPSGLFNAMFNYSGCWQKDAAPTKYLAFDGWLITLYSIELARSQLRLSEQVKRDVPSLWDPAALAAFIEKYGTHIIVGVKMGGKDIVHIKQLQNSKLEPAELQRRLKQVAEERFSDDANETSASNPTADLFGMMKDDNPLHWDIQRTLASSIKPPIVTHSMDDDVVTISVRRGGVDIGQSHNQWLSTISQAPNVISMSFVPITSLLGGTQGNGFLIHAVNLYLRYKPPIEELQQFLEFQLPRQWAPVYADLPLGLKRRRHASPSLQFSFMGPKLYVNTVTGMEIVGNNLMAQLLLIISMFCQSVCSSISLLVQCFVTMCF

SEQ ID NO: 288 - protein, 610 aa, Asplenium prolongatum x Asplenium antiquum (Kurata)
MASKHDIPNATKVANLAFQSLGRGYDLTCDLRFSSCKDVHGAPLIELGDKDVRKVFLPGGVVVPNVPTIVKCDKGEQTHFRSDILTFDQMSQEFNHGLSLSGKVPSGLFNYMFNFTGSWQKDASSTRHLALDGWFYTLYTLEMPRSHLALKDDIKATVPTSWEPAALARFIETFGTHIIIGAKIGGKDVVYLKQHQVSTSTLADFQKLLSEVSEERFSQTEGRASVGSKDSHSNNKRSTQFKSWTARLDTFSQIIYNDKHHVTIIPRRKGGFDRGQSHSDWVHTVPLAPDVISVSLVPITSLLNGVPGSGFLSHAVNLYLRYKPPTEELRQFLEFQLPCEWAPVFSELPLTLSRREQSPSTLQFTLMGPKLKVNKSQVTIGRRPVTGMRLFLEGKRCDRLSIHLQHLLAMPKFLISFWEDHPFASEATWQDPDDYSTKYFEPLQWKNFSHICTAPVENTETWIGDHAGASVVVGAQLAVKSFKLRNVLYLRLLYSKIPEAKIRRSEWDNVPAAAQKSGMFSSFFSTSFSSTAATIVAKAPAVVINSGVYPEGPPKPVHDPKLLKLVDTTEMTKGPQDMPGHWLVTGAKLYLDKRKISLRVKYSLLTVSLD

SEQ ID NO: 289 - protein, 634 aa, Colysis wrightii (Ching)
MASAAGGFAALQPQSSEAVSQNTPFSVAQQAIDALGRGYDVNSDLWLRYCQHSERVIESTPGPTQDLLLPGNIVIPKVSASITCDKGDRTRFTSDVLTFNEMSEQFNQNLAISGKIPVGYFNSMFGFTGSWQRDASAVKTLAMDGVFITLYSVELPRAQLTLKEEVKAAVPSSWDPAALASFLEKYGTHVIVGVKIGGKDVVCLKQHRSSSLSAVGVQKILEAKGKERFSSVEGSAAKKNLNKGKIRDGSPFGSNGMNAVNGSKDLPWMSDSSSENLVEMDDVTVIFKRKGGRELSQSHDEWLHTVPLLPDIVSMSFVPITSLLNGITGTGFLNHAINHYLRYKPPIQELHHFLEFQLPKEWAPAFGDLPLGPPRKQAGSPSLQFRLMGPKLQVNTTPVVIGKRCVTGLRLHLEGKKSNRLAIHLQYLTVVPQILQHLWQDDQPEVWEGPDDDFSKYFEPVMWKSFSHICTAPVESTETWEDEGKGGSGSKGAQVVTGAQLDVIQCGSKKVLFLKLLYSKIHKAKIRRSDWDHAPASQQKSGIFSTLMSTTFSSAQATPQKPVQVVVNSAIYPQGPPAANSQAPKLLKFVDTSEMTRGPLDLPGHWLVTGAKLFVDRGKIAVRAKYSLLLYSVD

SEQ ID NO: 290 - protein, 395 aa, Phormium (Lancer Terra Cotta)
MALKFPPRKAAEFAINSIGLGYDVAADIRLKYCKRETQDPCLIELDKDQLQDIVLPGGITVSNVPKSIKCDKGERTRFRSDVLSFQQMSEQFNQELSLSGKIPSGLFNYMFEFSNCWQKDAANTKSLAFDGWFITLYTVALAKSQIVLRDHVKQAVPSSWDPAALARFIEKFGTHVIVGVKMGGKDVIYVKQQHFSNLQPAEVQKILKDMADKRFLDVSGQYGMNSEEAFGKDKFDFKEQRLRFADSSSSSSYSTKEDIVRIFKRRGGNDNKDLPHPEWLNTVQYEPDVISMSFVPITSLLQGIPGSGFLSHAINLYLRYKPPTEELHQFLEFQLPRQWAPVFSDLPLGPQRKHQSTASLQFTFMGPKLYVNTSVVDVGKRPVTGNLFMLLTLLA

SEQ ID NO: 291 - protein, 385 aa, Phormium (Lancer Terra Cotta)
MALKFPPRKAAEFAINSIGLGYDVAADIRLKYCKRETQDPCLIELDKDQLQDIVLPGGITVSNVPKSIKCDKGERTRFRSDVLSFQQMSEQFNQELSLSGKIPSGLFNYMFEFSNCWQKDAANTKSLAFDGWFITLYTVALAKSQIVLRDHVKQAVPSSWDPAALARFIEKFGTHVIVGVKMGGKDVIYVKQQHFSNLQPAEVQKILKDMADKRFLDVSGQYGMNSEEAFGKDKFDFKEQRLRFADSSSSSSYSTKEDIVRIFKRRGGNDNKDLPHPEWLNTVQYEPDVISMSFVPITSLLQGIPGSGFLSHAINLYLRYKPPTEELHQFLEFQLPRQWAPVFSDLPLGPQRKHQSTASLQFTFMGPKLYVNTSSLTIFQLGLHA

SEQ ID NO: 292 - protein, 401 aa, Tupidanthus calyptratus
MFSDGRNPVLERKTRDGKQKVPEVFNRMLQSHTMQFSSITETSSKDGLTILSSKRGGDVFSQNHSNWLQTVASNPEAICFKLVPITSLLTGVPGSGYLSHAINLYLRYKPAPEDLRYFLEFQVPVQWAPLFCELPLRHQRRKASCPLLQFAFLGPKIHVSSTQVTSGEKPVVGLRLFLEGKKCNRMAIHAQHLSSLPNIMEFALSNSATSRPCQWRGSDDYISNDQFLEPVRWKRYSNVCSSVVEHDSNWIQGEEVGAFVVTGAQLISKGKWPKTILHLRLLFSYLPNCTIRKTEWAAAPEASQKSGFRLNLSTTFTFSQRTGADAPKQLPAALNSGVYPEGPPVPLRSKKLLKYVDVAEVVRGPHDTPGHWLVTAAKLVTDGGKIGLHVKFALLDYLPGS

SEQ ID NO: 293 - protein, 640 aa, Lygodium flexuosum
MKPAAATIRPNFYTSSSSSAPSDPASVAKQAVDALGRGYDVTGDLWLSKCREPLIVDLAESSPTQDLAIPGGISLPSVPAPIKCDKGDRTRFASDILSFSEMSEQFNKTLSIAGKIPLGLFNSMFGFTGLWQKDASSTKTLALDGVFINLYSVEVPRTHLNLREEVRKAVPSSWDPAALASFVDKYGTHVIVGVKIGGKDVIYVKQRHSSPLSAVSIQKILETKAVERFSSGETCTSKEKLTKGKDFQTKGIHGAEPNGQNGNLLRGHVDGMENSESFSLMEDSSTFSIDGDVTVIYKRKGGSESCQSHNDWLHTVPLAPDVVSMSFVPITTLLNGVPGTGFLSHAINLYLRYKPPLQELSNFLEFQLPKEWAPAFGDLPLGPPRKQQEVPSLQFRLMGPKLHINTTPVVVGKRPVTGLRLYLEGKKSNKLAIHLQYLTAVPQILKTLWVEDGGGEEEWVGPEEDFSKYFEPVQWRNFSHVCTAPVENSETWLGGPGGALVVVGARLQVQQYGAKKVLFLHLLYSRIAKARIRRSEWDHMPASQQKSGLFSTLISTTFSSAAAQSPAPPKPVVINSAIYPEGPPVPGQMPKLLKFVDTTEMTRGPHDLPGHWLVTGAKLLLERGKISLRAKYSLLLYSVE

SEQ ID NO: 294 - protein, 593 aa, Aglaomorpha (Roberts)
MASAKDAAALAAVEALGCGFDLTSDYRLKYKKGSLLELQRSHNKDLTIPGGITIPDVSRDIKCDKGERMRFASEVMQFQQMSQWFNQNASIEGKIPLGLFNAMFDLSGSWQDDASRLKSLAFDGSFITLYKLHLTRSNLVLREDVKKDIPSVWDPKSLAKFIEKYGTHIIVSASVGGQDVLYLKENDSSLLSAQDIRKKLKSAGDDYFSENSGKRNTDFKDSETLPLNSQPFRGTIAASAQLLISNKDYTVLSQRRGGYYFAKTHCEWQETVNMYPEAISLSFVPITSLVLGAAGSGFLQHAINLYLRYKPPVSDLQYFLDFQVPRQWIPVHNELPLRLARKQAFSPSLQFSLMSPKLYINNNEVVVNKKPVTGIRLYLEGRKNNRLGIHLQHLSVLPQSLGQFWSEGTQIESPQWNGSNDAPNDWFEPVEWRCFSHVCTQPIKFKSEWLNERDSAFVVTGARLDVKAHGLKSVLHLHLLFSKIPGCTIQRSRWDQHLAAEKTGFFSSISTTFSTTTKAGKKSPQVVVDSAVFMGGPPRPIQSPKLLKFVDTAELIKGPQDAPGHWVVTAARLELDRGKIAIKVKFSLLNYAE

SEQ ID NO: 295 - protein, 650 aa, Bolbitis cladorrhizans
MASSGGRLAALHPQSSEAAPRQNMSSLALSVAEHAVDALGRGYDVNSDLWLRSKHCECLIEDDKSGATQNLHLPGNIVIPNVPASVKCDKGDRTRFTSDILSFNEMSEQFNQTLSISGKIPVGHFNAMFNFTGSWQKDASQFKALAMDGVFINLYSVELPRTQLTLKEVPRTQLTLKEEVRAAVPSSWDPAALASFVEKYGTHVIVGVKIGGKDVICLKQHRSSSLSTVGVQKILESQAKERFSSVDSRAGKEKINKGKIRDGGSPFGSNGINAVHGLKDLSLISNSSSDSSKVETDDVIMIFTRKAGRNVSASHEEWLHTVASAPDIVSMSFVPITSLLNGVTGTGFLSHAINHYLRYKPPIQELRHFLEFQLPKEWAPAFGDLPLGPPRKQQASPSLQFRPMGPKLQVNTTPVVIGKRCVTGLRLHLEGKKGNRLAVHLQYLTVVPQILQRLWDDDQPEEWEGPDDDFSKYFEPVMWKSFSHVCTAPVEGNDTWEDEGKGEPGPKGALVVTGARLDVEHCGSKKVLFLRLLYSKIHKAKIRRSEWDDTPASQQKSGIFSTLMSTTFSSAQSAPQKPVQVVVNSAIYPEGPPPAKSQVPKLLKFVDTTEMTRGPLNLPGHWLVTGAKLFVDRGKITVRAKYSLLLYIVD

SEQ ID NO: 296 - protein, 307 aa, Blechnum brasiliense (Crispum)
MRFTSDVLTFSEMSEQFNQNLSISGKIPVGHFNAMFGFSGSWQKDASQVKTLAMDGVFINLYSVELPRAQLTLKEEVRAAVPSSWDPAALASFLEKYGTHVIVGVKIGGKDMICLKQHRSSTLAAVGVQKILEAKAKERFSSVEGSAAKEKINKGKIRDGSAYEANGMNAVFGSKDGMPLSWMNDTAPDLENDDVTVICKRKGGKDISQSHDEWLDTVPSAPDIVSMSFVPITSLLNGVTGTGFLTHAINHYLRYKPPIQELHHFLEFQLPKEWAPAFGDLPLGPPRKQQGSPSLAEETAGKSVAAV

SEQ ID NO: 297 - protein, 612 aa, Psilotum nudum
MAVNRPFSDSKTVAQRAIEALGKGYDVVADLRLSFCKGDLESRLIVLDETQVQELVFPGGIKIPNVPRAIKCDKGERTRFSSDVLSFHQMSEQFNQGLAISGKIPLGLFNAMFRLTGSWQSDASSTKSLAMDGWFITLYSVELPRSQVVLREEVKRAVPRSWDPAALARFINRYGTHIIVGMKIGGKDVLYLKQHQSSVRTPLEIQKILKKKAEERFAGVETNTSLDSRGIADKERTVDQPAWMDRTNQLVFGINCSVVDMKDMTILCQRRGGHDSKPNLSHCQWLHTVPSAPTVISMNFVPITSLLNGVPGSGFLNNAVNLYLRYKPPIEELYHFLEFQLSRLWAPVFNELPLGPPRKEHGPPALQFGLMRPKLYVKTSPVLVGKKPVTGLRLYLEGKKSNWLAIHLQHLATPPQILRPLWENGGELKWQGPEQFDPRYFEPVLWKSFSHVCTAPVANSKNIESCEDWHDAPAEAHIVVGAQLGVMEFSAKNILHLKLLYSRIPNVRIRRSEWDHSPATSQKSGIFSTLMSTTFSSTQTLPKPAPVIMNSGIFQGVPPVPVRVPKMLKFVDTTEMTKGPHDIPGYWLVTGAKLCLDRGKISLHVKYSLLSY

SEQ ID NO: 298 - protein, 601 aa, Tupidanthus calyptratus
MALKVSAPEAAKIAIQSIGCGYDISLDLRLKCCKGDPANPRLIEIHEDQGREIVLPGGIVIPNVSKAIKCDKGEHARFRSDVLSFQQMSEQFNQEMSLTGKIPSGVFNTMFEFTGSWQKDAAHTKTLAFDGLFITLYTVALDKSQMVLSDHVKKAVPSSWDPAALARFIEKFGTHIIVGVKMGGKDVIYMKQQHSSSLQPSDVQKRLKTIADKRFVDASGQYGMDSEQTHQNDKFQIREQRLRFADTSPSSSYSYKEDIVIICKRRGGSDNKNLTHNEWLHNVQLEPDVISMSFIPITSLLNGVSGSGFLSHAINLYLRYKPPVEELHQFLEFQLPRQWAPVFSDLPLGPQRRQQSTSSLQFSLMGPKLYVNTTPVDVGKRPVTGLRLYLEGKRSNRLAMHMQHLSSLPKVFQLKDDPNGNFRQESYDHRYYEKVQWKNFSHICTAPVESDEDLSIVTGAQLEVGDYGFKRVLFLRLRFSTVLGAVAVKHPEWDGSPGLARKSGLISTLISHHFTATLKPPPQPADVNINSAIYPGGPPAPTQSAKLLKFVDTTEMTRGPQETPGYWVVSGARLMVEKGRISLRVKYSLLTVMLPDEEALE

SEQ ID NO: 299 - protein, 609 aa, Pteris ensiformis (Evergemiensis)
MASKHEFPNAAKVAKLAVETLGRGYDLTCDLRFSSCKGADDTPLIEINTKETHELTLPGGIVVPKVPTIVNCDKGERTRFRSDILTFDQMSQEFNQGLSLSGKIPSGLFNYMFNFTGIWQKDASTTRHLALDGWFYTMYAVEIPRSQLVLKEEIKASVPESWEPAALARFIETFGTHIIVGAKIGGKDVVYMKQHQSSSSTSVEFQKLLAEVSDERFSQSERRTSAGSVENRSKRKNKIEFQSWSAHLDTASQIVYNEKHHVTILPRRKGGMDRFQNHSEWIHTVPLAPDVISVSLVPITFLLSGVAGSGFLSHAVNLYLRYKPPIEELRQFLEFQLPREWAPVFSDLPLTLSRKDHSPSTLQFTLLGPKLKVSKLQVIVGKRPVTGMRLYLEGKKCDRIAVHLQHLSAVPRLLQPLWEDHPFAGDAIWQDPDDYSTKYFEPVQWKNFSHVCTAPVENTETWIGDHAGASVVVGAQLAVKSFGLKNVLYLRLLYSRVPEARIRRSEWDHMPATTQKSGMFSSFLSTTFSSTQAPAPKAPPVVLNSGIFPEGPPRPVQDPKLLRFVDTTEMTKGPQDMPGHWLVTGAKLYLDKRRISLRVKYSLLTISSD

SEQ ID NO: 300 - protein, 640 aa, Asplenium australasicum
MASTVGGLAAMQAQSSEAAQPPNMSFTAFSIAQQAVDALGRGYDVNFDLRLGYCKQRKHLIENDELGPTQDLLLPGNISIPNLPASIKCDKGDRTRFTTEILTFNEMSEQFNQDLSISGKIPTGHFNTMFNFSGSWQKDASQVKTLALDGFFINLYTVELPRAQLTLKEEVRAAVPSSWDPAALASFVEKYGTHVIVGVKIGGKDVICLRQHHSSQLSAVGVQKILEAKAKERFTSIAGGTSRENNKGKIRDGFTYGSNAMIAVNGSKDGVHPSWLNSSLSDLPPVETDDVKVMFKRKGGKAVSQSHEEWLHTVPSSPDIVSMSFVPITSLLNGVTGTGFLSHAINHYLRYKPPIDQLRHFLEFQLPKDWAPAFGDLPLGPPRKQQASPSLQFRLMGPKLQVNTMPVVVGKRCVTGIRLHLEGKKSNRLAIHLQYLTAVPQILQGLWEDHRPDNWEGPDTDFSRYFEPVMWRSFSHVCTAPVESKEPWVDEMKGEPVLKGALVVTGAQLDVQQHGSKKVLFLRLLYSKIRKVRIRRSEWDHTPASQQRSGIFSTLISTHFSSAPSPLSKPVQVNSAIYPDGPPLANSQAPKLLKFVDTSAMTRGPLDLPGHWLVTGAKLCVERGKIAVRAKYSLLLYSED

SEQ ID NO: 301 - protein, 599 aa, Blechnum gibbum
MASGKDAAALAAVEALGCGFDLTSDYRLKYRKGPLLHLQHSSNKDLAIPGGITIPDVSRDVKCDKGERIRFASEVMQFQQMSQWFNQNASVEGKIPLGLFNAMFDLSGSWQDDAKQLKNLAFDGYFITLYKLHLTRSNLVLREEIKNDIPSVWDPLSLAKFIEKYGTHVIVSASVGGQDVLYLKENYSSLLSAQDIHKQLKSVGDGYFSDRGGEKSGNFKDNETLPLNALNSQPFRATVAHLHSAQVLVTNKDFTIISQRRGGYHFAKTHCGWQETVNIFPEAISLSFVPITSLISGFAGSGFLQHAINLYLRYKPPVSDIQYFLDFQVPRQWIPIHNELPLRLARKQTFSPSLQFSLTSPKLYINNNEVVVNRKPVTGIRLYLEGRKSNRLAIHIQHLSVLPQSLGQFWNEGTQLESPRWNGSNDAPKEWFEPVEWKCFSHVCTQPIKYKPEWLHDRDSAFVVTGARLEVKVHGLKSVLHLHLLFSKIPGCTIQRSRWDEHPAAEKTGFFSSISTTFSSTTKAGGKKGPPVLVDSAVFVGGPPRPIQCPKLLKYVDTAELTKGPQDAPGHWVVTAARLDLDGGKISLRVKFSLLNYAE

SEQ ID NO: 302 - protein, 612 aa, Tupidanthus calyptratus
MEGGEETVKPIGLRAMESLGLGFDFASDFRLKFAKRCPGAGGDDRLVVLDEASRRDVVFPGGGVIRGVPECIRCDKGDRIRFKSDVLKFNQMSELVNQKSSVQGKVPSGYFNAMFDLSGSWLNDAADANHLAFDGYFITLYCLHLTASPLVLRDKVKKSVPSHWNPASLSRFILTYGTHIIVGLAVGGQDVICVKQRPSSGIPPAELRGYLEDLGDCMFSDGRNPVLERKTRDGKQKVPEVFNRMLQSHTMQFSSITETSSKDGLTILSSKRGGDVFSQNHSNWLQTVASNPEAICFKLVPITSLLTGVPGSGYLSHAINLYLRYKPAPEDLRYFLEFQVPVQWAPLFCELPLRHQRRKASCPLLQFAFLGPKIHVSSTQVTSGEKPVVGLRLFLEGKKCNRMAIHAQHLSSLPNIMEFALSNSATSRPCQWRGSDDYISNDQFLEPVRWKRYSNVCSSVVEHDSNWIQGEEVGAFVVTGAQLISKGKWPKTILHLRLLFSYLPNCTIRKTEWAAAPEASQKSGFRLNLSTTFTFSQRTGADAPKQLPAALNSGVYPEGPPVPLRSKKLLKYVDVAEVVRGPHDTPGHWLVTAAKLVTDGGKIGLHVKFALL

SEQ ID NO: 303 - protein, 459 aa, Nephrolepis exaltata (compacta)
MSQQFNQGLSLSGKIPSGLFNYMFNFTGSWQKDASTTRHLALDGWFYTLYTVEIPRSQLVLKEDIKASVPTSWEAAALARFIETFGTHIIVGAKIGGKDVVYMKQHQSSPSTSIDFQKLLAEVSDERFAQTEGRTSVGSKDGRINKKKRGIEIQSWAAHLDTFSQITYNEKHHVTIIPRRKGGFDHGQSHSDWIHTVPLAPDIISVSLIPITSLLHGVSGSGFLSHAVNLYLRYKPPIEELRQFLEFQFPREWAPVFSELPLTLSRREHSVSTLQFTLMGPKLKVSKLQVTVGKKPVTGMRLFLEGKRCDKLAIHLQHLSAIPRFLQPLWEDHPFAREVTWQDPDDCSTKYFEPVQWKNFSHVCTAPVENMETWIGDHAGACVVIGAQLAVKSFGLKNVLYLRLLYSKIPEAKIRRSEWDHMPASTQKSGMFSSFLSSDQGSTGHAGTLVSNRGQALPG

SEQ ID NO: 304 - protein, 461 aa, Bolbitis cladorrhizans
MASSGGRLAALHPQSSEAAPRQNMSSLALSVAEHAVDALGRGYDVNSDLWLRSKHCECLIEDDKSGATQNLHLPGNIVIPNVPASVKCDKGDRTRFTSDILSFNEMSEQFNQTLSISGKIPVGHFNAMFNFTGSWQKDASQFKALAMDGVFINLYSVELPRTQLTLKEEVRAAVPSSWDPAALASFVEKYGTHVIVGVKIGGKDVICLKQHRSSSLSTVGVQKILESQAKERFSSVDSRAGKEKINKGKIRDGGSPFGSNGINAVHGLKDLSLISNSSSDSSKVETDDVIMIFTRKAGRNVSASHEEWLHTVASAPDIVSMSFVPITSLLNGVTGTGFLSHAINHYLRYKPPIQELRHFLEFQLPKEWAPAFGDLPLGPPRKQQASPSLQFRPMGPKLQVNTTPVVIGKRCVTGLRLHLEGKKGNRLAVHLQYLTVVPQILPLALCKHERSSSTSLAQNTC

SEQ ID NO: 305 - protein, 608 aa, Vernonia noveboracensis
MSFYQTNFYDPQSAAEKAVSVIGYGYDLTSDIRLTGCKPGPTGSTLIELDRTLSKDLVVPGGVVVHDVSPAIKCDKGERTRFHSDVLSFNHMSEQFNQEVSLSGKIPSGFFNSMFGYKGCWQKDAATTKNLAFDGWFITLYNIELEKAQIVLSEKVKQQVPSLWDPTALAEFIDKYGTHIVVGVKMGGKDVIYLKQLHSSNLEPTEVQNLLKQLADDEWSEDVSASSVSGPDKLIKQKDARSVAWDIPVLGNSIRQPIVISRSKKDDLLSIHVRQGGIDHGQSHKSWLSTVSQSPNVISMSFVPIVALLGGVRGSGFLSHAINLYLRYKPPIEELEQFLEFQLPRQWAPAYGDLPLAPRRKKTPSPSLQFTFLGPRLYVNTIKVDSENRPVTGVRLYLEGRKSDRLAIHLQHLSSTPKMLELSDDFSYKPSDGTIGKGYFEPVKWSIFSHVCTVPVEYNETRIDDPASIVTKAWFEVKGVGMKKVLFLRLGYSMVGSAMIRRSEWDGPSMHSRKSGIMSTLMSTPFSMGLATPEQKPVKVDLNSAIYPDGPPSKAPKMSSFVDTKEMIRGPEDPPGYWVVTGAKLCVEAGRIRVKVKYSLLTIMSEDS

SEQ ID NO: 306 - protein, 336 aa, Phormium (Lancer Terra Cotta)
MRPTDLMTPEAAAAAAVSAVGYGYDLVGDLRLSSCKAGPSGSRLIKIDDALVHDLVLPGGVVVPNVPKEIRCDKGERTRFRSDVLGFHQMAEQFNQDLSLSGKIPSGLFNAMFDFRGCWQKDLSSTKSLAFDGWFITLYSIELAKSHIVLQDKIKQEIPSSWDPVALAEFIEKYGTHIIVGIKMGGKDAVSIKQLQESALQQTEVQNLLKNLADDAFSEDFNANILLGAAEISKRLKGIKLANQENNAAVLKSMNSSIVTHLKKDDIVSIHVRRGGINTKQSHNQWLSTISQAPNVISMSFVPITSLLTGVRGSGFLRSAAERDSKSSKFLKLLKF

SEQ ID NO: 307 - protein, 388 aa, Tupidanthus calyptratus
MEGGEETVKPIGLRAMESLGLGFDFASDFRLKFAKRCPGAGGDDRLVVLDEASRRDVVFPGGGVIRGVPECIRCDKGDRIRFKSDVLKFNQMSELVNQKSSVQGKVPSGYFNAMFDLSGSWLNDAADANHLAFDGYFISLYYLHLIASPLVLRDKVKNSVPSHWNPASLSRFILTYGTHIIVGLAVGGQDVICVKQRPSSGIPPAELRGYLEDLGDCMFSDGRNPVLERKTRDGKQKVPEVFNRMLQSHTMQFSSITETSSKDGLTILSSKRGGDVFSQNHSNWLQTVASNPEAICFKLVPITSLLTGVPGSGYLSHAINLYLRYKPAPEDLRYFLEFQVPVQWAPLFCELPLRHQRRKASCPLLQFAFLGPKIHVSSTQVPTPFPLI

SEQ ID NO: 308 - protein, 396 aa, Tupidanthus calyptratus
MEGGEETVKPIGLRAMESLGLGFDFASDFRLKFAKRCPGAGGDDRLVVLDEASRRDVVFPGGGVIRGVPECIRCDKGDRIRFKSDVLKFNQMSELVNQKSSVQGKVPSGYFNAMFDLSGSWFNDAADSNHLAFDGYFISLYYLHLIASPLVLRDKVKNSVPSHWNPASLSRFILTYGTHIIVGLAVGGQDVICVKQRPSSGIPPAELRGYLEDLGDCMFSDGRNPVLERKTRDGKQKVPEVFNRMLQSHTMQFSSITETSSKDGLTILSSKRGGDVFSQNHSNWLQTVASNPEAICFKLVPITSLLTGVPGSGYLSHAINLYLRYKPAPEDLRYFLEFQVPVQWAPLFCELPLRHQRRKASCPLLQFAFLGPKTRMSSTQVIYLSTQTDMRMHRSL

SEQ ID NO: 309 - protein, 406 aa, Vernonia noveboracensis
MLKNQKLKAMADKRFLDSDGQYVIDAEHICHNDKDNIRGQRLRFADSDPSSSYSYKEDLVSIYKRRGGSDDRNLKHNEWLHSVQLEPDVISMSFIPITSLLNGVSGSGYLSHAINLYLRYKPPVEELHQFLEFQLPRQWAPVFSDLPLGPQRKQQTTPSLQFSFFGPKLYVNINPVDVGKRPVTGLRLYLEGKRSNRLAIHLQHLSSLPKVFQLEDDVDGNLAEESYDRRYYEKVQWKHFSHVCTAPVESDDELSIVTGAHLHVGDYGFKRILFLRLRFSTVVGAAAIKNPEWDGSPGLARKSGLISTLISHHFTAVLKSQPQAAEVNINSAIYPGGPPAPVQVPKLLKFVDTAEMTRGPQESPGYWVVSGARLVVDKGKISLRVKYSLLTVISADEEEEAAAAFY

SEQ ID NO: 310 - protein, 644 aa, Asplenium australasicum
MASAVGRFAATQAQSSEAAQPQITSSPAFSIAQQAVDALGRGYDVNFDLRLGYCKQRKHLIENDELGPTQDLLLPGNISIPNLPASIKCDKGDRTRFTTEILTFNEMSEQFNQDLSISGKIPTGHFNTMFNFSGSWQKDASQVKTLALDGFFINLYTVELPRAQLTLKEEVRAAVPSSWDPAALASFVEKYGTHVIVGVKIGGKDVICLRQHHSSQLSAVGVQKILEAKAKERFTSIAGGTSRENNKGKIRDGFTYGSNAMIAVNGSKDGVHPSWLNSSLSDLPPVETDDVKVMFKRKGGKAVSQSHEEWLHTVPSSPDIVSMSFVPITSLLNGVTGTGFLSHAINHYLRYKPPIDQLRHFLEFQLPKDWAPAFGDLPLGPPRKQQASPSLQFRLMGPKLQVNTTPVVVGKRCVTGIRLHLEGKKSNRLAIHLQFLTVVPQILQSRWEDDQLEDWEGPDTDFSKYFEPVMWRSFSHVCTAPVESREPWAADEMAGEAALKGALVVTGAQLDVEQHGSKKVLFLRLLYSKIHKAMNRRSEWDHTPASSQRSGIFSTLISTPFSSAAASSPAAAKPVHVNSAIYPDGPPPANSQAPKLLKFVDTSEMTRGPLDLPGHWLVTGAKLCVERGKIAVRAKYSLLLYSED

SEQ ID NO: 311 - protein, 536 aa, Tupidanthus calyptratus
MEGGEETVKPIGLRAMESLGLGFDFASDFRLKFAKRCPGAGGDDRLVVLDEASRRDVVFPGGGVIRGVPECIRCDKGDRIRFKSDVLKFNQMSELVNQKSSVQGKVPSGYFNAMFDLSGSWFNDAADSNHLAFDGYFISLYYLHLIASPLVLRDKVKNSVPSHWNPASLSRFILTYGTHIIVGLAVGGQDVICVKQRPSSGIPPAELRGYLEDLGDCMFSDGRNPVLERKTRDGKQKVPEVFNRMLQSHTMQFSSITETSSKDGLTILSSKRGGDVFSQNHSNWLQTVASNPEAICFKLVPITSLLTGVPDKPAPEDLRYFLEFQVPVQWAPLFCELPLRHQRRKASCPLLQFAFLGPKIHVSSTQVTSGEKPVVGLRLFLEGKKCNRMAIHAQHLSSLPNIMEFALSNSATSRPCQWRGSDDYISNDQFLEPVRWKRYSNVCSSVVEHDSNWIQGEEVGAFVVTGAQLISKGKWPKTILHLRLLFSYLPNCTIRKTEWAAAPEASQKSGFRLNLAQLSHSVSELVLMHQSSFQLH

SEQ ID NO: 312 - protein, 597 aa, Verbascum chaixii (Vill)
MSDEIVKSALASLGKGFDLSSDFRLKYCKGDDRLVMLNQTHTRQLSVPGFGSFNNISIDIKCDKGDRTRYQSDILDFNQMSELFNHKCSVPGKIPSGSFNSMFGFQSGSWANDAGNTKYLGLDGYFIVLFDVHIDRYPLILADEVRNDVPSTWDPSALARFIEKYGTHIIVGISIGGEDVVLVKQDKSSNMEPSQLKNHLDNLGDQLFNGACTFPPHQFKNKEQKYKAPEAFNVFDPQPNIFSNFATITAKDGISVICSKMGGDTTVSTHCEWLLTVPSKPDAIHFNFIPITSLLRGIPGKGFLSHAINLYLRYKPPIADLKYFLDFQAHRIWAPIHNDLPLGPIRSKALQTPALHFNMMGPKLYVNTSQVTVGNTPVTGMRLYLEGMKCNRLGIHLQHFINPPVLLQDKILEPPTWRGSHETPDHHRYLEPIQWKKFSHICTSPVKFDPEWLNPGQDAAYIVTGAQLHVKKHESKTVLHLRLSYSKVSNCYVVQSNWMQFASDNHSMKSGFFSSISTSISGSVEKEKMATVIVDSGVYPTGPPVQTQKMLKFVDTSEMRRGPSDNPGHWLVTGAKLDLEKGKICLRVKFSLLNVCS

SEQ ID NO: 313 - protein, 314 aa, Sphaeropteris cooperi
MGSEAAARKVALDAVQSLGRGFDVTADFRTKFCKKRLVHIVNDGLESLTLPGDITIDAPSVIKCDKGECTRHTSDLMQFQQMSQAFNKRALIDGKIPLGHFNAMYDFTGSWFEDAMQTKNLAFDGKFITLFQLQLTSSLLLRKEVKNAVPSAWEPAALARFISLYGTHIVVRVSVGGQDVLYLKENASSMMSSADVHKHLKNLGDQMFAEKGVQKIQDGNSLRGCSIAPVEIDGTNILYKSKDLTIIAKKRGGRLCAKTPSEWQATVMSAPDVIMMSFVPITALLSGTPGSGFLNHAINLYLRCSKSTRFKYIL

SEQ ID NO: 314 - protein, 606 aa, Symphoricarpos x chenaultii (Hancock)
MGSSKETAKRLKALAEVAIESIGLGYDVAEDLRIKYCKDKSTRLITIDDDQVRDIVIPGGILIPNVSKSIKCDKGERMRFSSDVLSFQQMSEQFNQEVSLSGKIPTGHFNAAFEFTGSWQKDAANTKALAFDGVFITIYSIALEKTQIALCDHIKQAVPSSWDPPALARFIEKFGTHVVVGVKMGGKDSIYVKQQHSSPLQPDEVQKRLKDVADKRFSDAGGQNNTNDRFGNNELGLTFMDSTTSSSYLHKEDITLFWRRRGGSTSKNLDHNKWCQSVQLEPDVISMSFIPISSLLSGVHGSGFLSHAINLYLRYKPPIEELHQFLEFQLPRQWAPVFGELAVGPERKQQNGASLQFSFMGPKLYVNSNLVDVSKPVTGLRLYLEGKRNNCLAIHLQHLSTLPKSFHLEDDPKSNSSQTVYDRRYYERVQWKNFSHVCTAPIESSYSDDEKNDLSIVTGAQFEVRESGMKRVLFLRLHFSRAVGSMVVKKPEWDGSPVLTQKSGIISNLLSSHLSSTAQKQAPPLPSDVNINSALYPGGPPVPAQATKLLRFVDTTEMTRGPQDPPGYWVVSGARLVVDKGKISLRVKYSLLAPVILPDEEEEVPL

SEQ ID NO: 315 - protein, 604 aa, Tupidanthus calyptratus
MGSSKEIGLKLKATAEAAIQSIGFGYDITEDLRLKYCKGSRLIVIDDDQVRDIVIPGGILVPNVSKQINCDKGERIRFSSDGLSFQQMSEQFNQEVSLSSKIPTGHFNAAFQFTGCWQKDAANTKTLALDGVFITIYTIALEKSQITLCDHIKEAVPSSWDPAALARFIEKFGTHVIVGVKMGGKDIVYMKQQHSSPLQSDEVQKRLKHVADNRFSNASGHSTNPEKVYEREMLEINEPPQEFMDDSASSSYMDLEDITFFYRRRGGSNKKNLPHDKWCQSVQLEPDVISMSFIPISSLLSGINGNGFLTHAINLYLRNLYLRYKPAIEELSQFLEFQHPRQWAPVFGELAVGPERKQQSGASLQFSFLGPKLYVNTTLVDAGKRPVTGLRLYLEGTKSNCLAIHLQHLSTLPKSFQLQDEATCNYGSNDQRYYEKVQSKSFSHVCTGPVESDEDHSIVTGAQFEVRNSGMKRVLFLRLHFSKVIGSTVFKQPEWDGSPIIAQKSGIISTLISSRFSANQKQPPRPSDFNINSAIYPSGPPVPAQATKLLRFVDTSEMTRGPQDRPGYWIVSGARLLVDRGKISLCVKYSLLAVILPEDEMSLQ

SEQ ID NO: 316 - protein, 462 aa, Vernonia noveboracensis
MFPRRLSAIKVNAPGFTPTFFPSIMFIDKYGTHIVVGVKMGGKDVIYLKQLHSSNLEPTEVQNLLKQLADDEWSEDVSASSVSGPDKLIKQKDARSVAWDIPVLGNSIRQPIVISRSKKDDLLSIHVRQGGIDHGQSHKSWLSTVSQSPNVISMSFVPIVALLGGVRGSGFLSHAINLYLRYKPPIEELEQFLEFQLPRQWAPAYGDLPLAPRRKKTPSPSLQFTFLGPRLYVNTIKVDSENRPVTGVRLYLEGRKSDRLAIHLQHLSSTPKMLELSDDFSYKPSDGTIGKGYFEPVKWSIFSHVCTVPVEYNETRIDDPASIVTKAWFEVKGVGMKKVLFLRLGYSMVGSAMIRRSEWDGPSMHSRKSGIMSTLMSTPFSMGLATPEQKPVKVDLNSAIYPDGPPSKAPKMSSFVDTKEMIRGPEDPPGYWVVTGAKLCVEAGRIRVKVKYSLLTIMSEDS

SEQ ID NO: 317 - protein, 669 aa, Aglaomorpha (Roberts)
MASAAGGFAALQPQSSEAARPQYTPFSVAQQAVDALGRGYDVNSDLWLRYCQHTERLIDSNPGPTQDLLLPGNILIPKVSASIKCDKGDRTRFTSDVLTFNEMSEQFNQNLAMSGKIPVGHFNSMFGFSGSWQRDASAVKTLAMDGVFITLYSVELPRAQLTLKEEVKAAVPSSWDPAALASFLEKYGTHVIVGVKIGGKDVICLKQHRTSSMSAVGVQKILEAKGKERFSSIEGSAAKEKINKGKIRDGSPFGSNGMNAVNGSKDLPWMSDSSTEYSTVETDDVTVIFKRKGGRDLSQSHEEWLRTVPSFPDIVSMSFVPITSLLNGVTGTGFLNHAINHYLRYKPPIQELHHFLEFQLPKEWAPAFGDLPLGPPRKQAGSPSLQFRLMGPKLQVNTTPVVIGKRCVTGLRLHLEGKKSNRLAIHLQYLTVVPQIGKRCVTGLRLHLEGKKSNRLAIHLQYLTVVPQILQQLWQDDQPEEWEGPDDDFSKYFEPVMWKSFSHVCTAPVESTETWEDEGRGGSGSKGAQVVTGAQLDVLQCGSKKVLFLKLLYSRIHKAKIRRSEWDHTSASQQKSGIFSTLMSTTFSSAQAAPQKPVQVVVNSAIYPQGPPAANSQAPKLLKFVDTSEMTRGPLDLPGHWLVTGAKLFVDRGKIAVRAKYSLLLYSVD

SEQ ID NO: 318 - protein, 260 aa, Waldsteinia ternata
MRFGSDVLSFQQMSEQFNQELALSGKIPSGHFNTAFEFTGGWQKDAANTKTLAFDGVSITLYSVALEKSQVSLREQVKQDVPSSWDPTALARFISKYGTHVIVGVKMGGKDTIYAKQMYSSPVQPADVQKKLKDMADKMYVDGNSHSGVTSEKFHERDKFIKEQGLGIMNAIPSSSYASVESQDIKFVCKRKGGSLHKNLRHSEWSQTVQLEPDVISMSFVPITSLLSGIHGSGFLTHAINLYLRCKLLNSPHLFTTAVT

SEQ ID NO: 319 - protein, 598 aa, Tupidanthus calyptratus
MEGGEETVKPIGLRAMESLGLGFDFASDFRLKFAKRCPGAGGDDRLVVLDEASRRDVVFPGGGVIRGVPECIRCDKGDRIRFKSDVLKFNQMSELVNQKSSVQGKVPSGYFNAMFDLSGSWLNDAADANHLAFDGYFISLYYLHLIASPLVLRDKVKNSVPSHWNPASLSRFILTYGTHIIVGLAVGGQDVICVKQRPSSGIPPAELRGYLEDLGDCMFSDGRNPVLERKTRDGKQKVPEVFNRMLQSHTMQFSSITETSSKDGLTILSSKRGGDVFSQNHSNWLQTVASNPEAICFKLVPITSLLTGVPDKPAPEDLRYFLEFQVPVQWAPLFCELPLRHQRRKASCPLLQFAFLGPKIHVSSTQVTSGEKPVVGLRLFLEGKKCNRMAIHAQHLSSLPNIMEFALSNSATSRPCQWRGSDDYISNDQFLEPVRWKRYSNVCSSVVEHDSNWIQGEEVGAFVVTGAQLISKGKWPKTILHLRLLFSYLPNCTIRKTEWAAAPEASQKSGFRLNLSTTFTFSQRTGADAPKQLPAALNSGVYPEGPPVPLRSKKLLKYVDVAEVVRGPHDTPGHWLVTAAKLVTDGGKIGLHVKFALL

SEQ ID NO: 320 - protein, 289 aa, Microsorum musifolium (Blume)
MASKPGIPNAAKIAHLAIQSLGRGYDLTCDLRFSSFKDVNGASLIDLKNNETIDLSLPGGVVIANVPAIVKCDKGERTRFRSDILSFDQMSEQFNHGLSLSGKIPCGLFNNMFSFTGSWQKDASTTKHLALDGWFYTLYTVEMPRSQLVLKKDIKASVPSSWEPAALARFIETFGTHIILGVKIGGKDVVYMKQHQSSPSTSIEFQKLLAEVSDERFLQIEGRASVGSKNSHNNKKHNIEFQSSPSTSIEFQKLLAEVSDERFLQIEGRASVGSKNSHNNKKHNIEFQS

SEQ ID NO: 321 - protein, 327 aa, Nephrolepis exaltata (compacta)
MASKLDIPNAAKVANIAIQSLGRGYDLTCDLRFSTFKDVNGASLIELRNNETLELSLPGGVVVTNVPAIVKCDKGEQTHFRSDIVTFDQMSQQFNQGLSLSGKIPSGLFNYMFNFTGSWQKDASTTRHLALDGWFYTLYTVEIPRSQLVLKEDIKASVPTSWEAAALARFIETFGTHIIVGAKIGGKDVVYMKQHQSSPSTSIDFQKLLAEVSDERFAQTEGRTSVGSKDGRINKKKRGIEIQSWAAHLDTFSQITYNEKHHVTIIPRRKGGFDHGQSHSDWIHTVPLAPDIISVSLIPITSLLHGVLVRAILIGFTLSLLLLILFP

SEQ ID NO: 322 - protein, 591 aa, Aglaomorpha (Roberts)
MASAKDAAALAAVEALGCGFDLTSDYRLKYKKGSLLELQRSHNKDLTIPGGITIPDVSRDIKCDKGERMRFASEVMQFQQMSQWFNQNASIEGKIPLGLFNAMFDLSGSWQDDASRLKSLAFDGSFITLYKLHLTRSNLVLREDVKKDIPSVWDPKSLAKFIEKYGTHIIVSASVGGQDVLYLKENDSSLLSAQDIRKKLKSAGDDYFSENSGKRNTDFKDSETLPLNSQPFRGTIAASAQLLISNKDYTVLSQRRGGYYFAKTHCEWQETVNMYPEAISLSFVPITSLVLGAAGSGFLQHAINLYLRYKPPVSDLQYFLDFQVPRQWIPVHNELPLRLARKQAFSPSLQFSLMSPKLYINNNEVVVNKKPVTGIRLYLEGRKNNRLGIHLQHLSVLPQSLGQFWSEGTQIESPQWNGSNDAPNDWFEPVEWRCFSHVCTQPIKFKSEWLNERDSAFVVTGARLDVKAHGLKSVLHLHLLFSKIPGCTIQRSRWDQHLAAEKTGFFSSISTTFSTTTKAGKKSPQVVVDSAVFMGGPPRPIQSPKLLKFVDTAELIKGPQDAPGHWVVTAARLELDRGRVESEDIVLLQGS

SEQ ID NO: 323 - protein, 606 aa, Tupidanthus calyptratus
MALKVSAPEASAPEAAKIAIQSIGCGYDISLDLRLKYCKGDLTNPRLIEIHEDQGREIVLPGGIVIPNVSKAIKCDKGEHARFRSDVLSFQQMSEQFNQEMSLTGKIPSGVFNTMFEFTGSWQKDAANTKTLAFDGVFITLYTVALEKTQMILSDHVKQAVPSSWDPAALARFIEKFGTHIIVGVKMGGKDVIYMKQQHSSSLQPSDVQKRLKTIADKRFVDASGQYGMDSEQTHQNDKFQIREQRLRFADTSPSSSYSYKEDIVIICKRRGGSDNKNLTHNEWLHNVQLEPDVISMSFIPITSLLNGVSGSGFLSHAINLYLRYKPPVEELHQFLEFQLPRQWAPVFSDLPLGPQRRQQSTSSLQFSLMGPKLYVNTTPVDVGKRPVTGLRLYLEGKRSNRLAMHMQHLSSLPKVFQLKDDPNGNFRQESYDHRYYEKVQWKNFSHICTAPVESDEDLSIVTGAQLEVGDYGFKRVLFLRLRFSTVLGAVAVKHPEWDGSPGLARKSGLISTLISHHFTATLKPPPQPADVNINSAIYPGGPPAPTQSAKLLKFVDTTEMTRGPQETPGYWVVSGARLMVEKGRISLRVKYSLLTVMLPDEEALE

SEQ ID NO: 324 - protein, 306 aa, Tupidanthus calyptratus
MYRRRLSAVKASDRTLTKDLNLPCGRVVRNVSPSIKCGKGEQTRFHSDVLTFVQMSEQFNQDISLSGKIPSGLFNAMFDFKGCWQKDAATTKSLAFDGWFFSMYNIELARSQITLSEQVKKEVPSSWDPAALAEFIEKYGTHIVVGVKMGGKDVIHLKQLQNSNLQPTEVQKLLKQLADERFSEDVNGSLIPNPEKSSGKQKEEPSIVQDLNLPFANLLRQAVVSQSKNDDLLSIRIRRGGFDTGQSHKQWLSTVSQFPNAISMSFVPLASLLSGIRGSGFLSHAINLYLRYKPPMEELEQFLEFQ

SEQ ID NO: 325 - protein, 574 aa, Passiflora coccinea x Passiflora incarnata (Lady Margaret)
MRQRRQEGDRTRLIEIDEDEGREIVLPGGVSIPNVSKSIKCDKGDRTRFRSDVLSFQQMSEQFNLELSLTGKIPSGLFNSMFEYSGCWQKDAANTKALAFDGVFITLYSVALGKSHMELCDRVKKAVPSSWEPAALAKFIETFGTHIIVGVKMGGKDVIYIKQQHSSTLQPADLQKRLKEMADKRFLDTNGQYSMTSEQAFQSNKFEIREQRLRFADISPSSSYSHKEDIVRIYKRRGGSDNGVLSHSEWLHTVQSEPDVISMSFIPITSLLNGVPGSGFLSHAINLYLRYKPPIEELYQFLEFQLPRQWAPVFSELPLGPQRKQQNSASLQFSLMGPKLFVNVTPVDVGKRPVTGLRLYLEGKRSNRLAIHLQHLSSLPKIFQLIDDPNGNFQKDSYDRKYYEKVQWKHFSHVCTAPVESDKDLSIVTGAQLQVENSGFRNILFLRLRFSTVLGAVVVKHPEWDGSPGLFPKSGLISTLISHHFTAVQKPPPRPADVNINSAVYPGGPPVPVQTPKLLKLVDTTEMTRGPQETPGYWVVSGARLVVEKGRISLRVKYSLLTVVQSDDDIEEEL

SEQ ID NO: 326 - protein, 601 aa, Phormium (Lancer Terra Cotta)
MALKVPLQKAAEIAINSIGLGYDIATDIRLKYCKRESPDPCLIELENGQVQDIVLPGGITVSNVPKSIKCDKGERTRFRSDVLSFQQMSEQFNQELSLSGKIPSGLFNYMFEFSNCWQKDAANTKSLAFDGWFITLYTVALAKSQIVLRDHVKQAVPSSWDPAALARFIEKFGTHVIVGVKMGGKDVIYVKQQHFSNLQPAEVQKILKDMADKRFLDVSGQYGMNSEEAFGKDKFDFKEQRLRFADSSSSSSYSTKEDIVRIFKRRGGNDNKDLPHPEWLNTVQYEPDVISMSFVPITSLLQGIPGSGFLSHAINLYLRYKPPTEELHQFLEFQLPRQWAPVFSDLPLGPQRKHQSTASLQFTFMGPKLYVNTSVVDVGKRPVTGLRLYLEGKRSNRLAIHLQHLSSLPRIFELREDPSSSYSRESHDRKYYEPIQWRHFSHVCTAPIEADEDNSIVTGAQLHVGHYGLKKVLFLRLHFSTVSNVTLVRNHEWDGSPGLAHKSGLISTLISTRFTAAIQKPPPRPADVYINSAVYPGGPPVPVQTPKLLKFIDTTEMVRGPQNPPGYWVVSGAKLQLERGKISLRVKYSLLTVLVPDDDDV

SEQ ID NO: 327 - protein, 609 aa, Ophioglossum pendulum
MAACQPSPESVSVARQAIQALGRGYDVVSDLRLSYCKGEPGSPLVILDNARTQDIAVPGGITIHSVPKIIKCDKGERTRFCSDVLPFNQMSEHFNQGLFISGKIPLGLFNAMFGFSGSWQRDALSSKSLAMDGWFVTLYSAELPRSQLQLQEEVVKAVPTTWDPAALARFIDNYGTHIIVGIKIGGKDVIYLKQHQSSNLSPVEIQKILKKKANEVFSGLEERSSLDSKERADTDRVIEQQAWMNQGSRGPVTSYLKKEDITILHHRRGGNDHIDGQSHDKWLQTLLNAPTVISMSFVPITSLLSGVPGCGFISHTVNLYLRYKPQIEELHHFLEFQLPRQWAPVFSELPLGPPRKERGTPALQFSLLGPRLYVNTSSLNVGKKPVTGLRLFLEGKKNNRLAIHLQHLSSLPRILQPLWEQHTEEPKWQDPEAFDSRFFEPVLWRSFTHVCTAPVENSETWIGDPAGAYVVIGAQLRVLEAVTKNVLYLKLLYSRIPQATIRRSEWDHTPATAQKTGFFSTFMSTTFSSTPPQPKPVPVVMNSGVFAGGPPVPVQVPKLLKFVDTTEMTKGPQDAPGHWLVTGAKLYLDRGKVSLRVKYSLLIYGNTSP

SEQ ID NO: 328 - protein, 570 aa, Tupidanthus calyptratus
MEGGEETVKPIGLRAMESLGLGFDFASDFRLKFAKRCPGAGGDDRLVVLDEASRRDVVFPGGGVIRGVPECIRCDKGDRIRFKSDVLKFNQMSELVNQKSSVQGKVPSGYFNAMFDLSGSWLNDAADANHLAFDGYFITLYCLHLTASPLVLRDKVKKSVPSHWNPASLSRFILTYGTHIIVGLAVGGQDVICVKQRPSSGIPPAELRGYLEDLGDCMFSDGRNPVLERKTRDGKQKVPEVFNRMLQSHTMQFSSITETSSKDGLTILSSKRGGDVFSQNHSNWLQTVASNPEAICFKLVPITSLLTGVPDKPAPEDLRYFLEFQVPVQWAPLFCELPLRHQRRKASCPLLQFAFLGPKIHVSSTQVTSGEKPVVGLRLFLEGKKCNRMAIHAQHLSSLPNIMEFALSNSATSRPCQWRGSDDYISNDQFLEPVRWKRYSNVCSSVVEHDSNWIQGEEVGAFVVTGAQLISKGKWPKTILHLRLLFSYLPNCTIRKTEWAAAPEASQKSGFRLNLSTTFTFSQRTGADAPKQLPAALNSGVYPEGPPVPLRSKKLLKYVDVAEVVRGPHD

SEQ ID NO: 329 - protein, 275 aa, Nephrolepis cordifolia (Duffii)
MSEQFNQNLSISGKIPVGHFNAMFGFSGSWQKDASVVKTLAMDGVFITLYSVELPRTQITLKEEVRAAVPSSWDPAALASFVEKYGTHVIVGVKIGGKDAICLKQHRSSSLSAVEVQKILETKAKERFLSVEGNTAKERINKGKIRDGSPYGSNGMAALNLSKDETTLSWLSDTSTDHSTVETNDVTVIFKRKGGRENSTSHDEWLHTVASFPDIVSMSFVPITSLLNGITGTGFLSHAINHYLRYKPPIQELHHFLEFQLPKEWAPAFGDLPLG

SEQ ID NO: 330 - protein, 601 aa, Tupidanthus calyptratus
MALKVSAPEAAKIAIQSIGCGYDISLDLRLKCCKGDPANPRLIEIHEDQGREIVLPGGIVIPNVSKAIKCDKGEHARFRSDVLSFQQMSEQFNQEMSLTGKIPSGVFNTMFEFTGSWQKDAANTKTLAFDGVFITLYTVALEKTQMILSDHVKQAVPSSWDPAALARFIEKFGTHIIVGVKMGGKDVIYMKQQHSSSLQPSDVQKRLKTIADKRFVDASGQYGMDSEQTHQNDKFQIREQRLRFADTSPSSSYSYKEDIVIICKRRGGSDNKNLTHNEWLHNVQLEPDVISMSFIPITSLLNGVSGSGFLSHAINLYLRYKPPTEELHQFLAFQLPLHWAPVFSVHPLGLQPRQQSTASLQFSFMGPKLHVNTSPVDVGKRPVTGLRLYLEGKKSNRLAIHMQHLSSLPEFFQLEDDPNGNFRQESYDRRYYEKVQWKNFSHICTAPVESDEDLSIVTGAQLEVGDYGFKRVLFLRLRFSTVLGAVAVKHPEWDGSPGLARKSGLISTLISHHFTATLKPPPQPADVNINSAIYPGGPPAPTQSAKLLKFVDTTEMTRGPQETPGYWVVAGARLMVEKGRISLRVKYSLLTVMLPDEEALE

SEQ ID NO: 331 - protein, 636 aa, Platycerium wandae
MASAAGGFAALQPQSSEAGAPQSTAFSVAQLAIDALGRGYDVNCDLWLRNCPHNERLIEDNPGPTQDLLLPGNIVIPNVAASIKCDKGDRTRFTSDVLTFNEMSEQFNQNLALSGKIPVGHFNAMFGFSGSWQKDASAVKNLAMDGVFITLYSVELPRSQLILKEEVKAAVPSSWDPAALASFLEKYGTHIIVGVKIGGKDVICLKQHRSSSLSAVGVQKILEAKGKERFSSVEGSTSKEKINKGKIRDGSSFGSNGMNALNGSKDLPWMSDSSTDYSTVETEDVTVIFKRKGGRDRSQSHDEWLHTVPLFPDVVSMSFVPITSLLNGITGTGFLNHAINHYLRYKAPIQELHHFLEFQLPKEWAPAYGDLPLGPPRKQAGSPSLQFRLMGPKLQVNTTPVVIGKRCVTGLRLHLEGKKSNRLAIHLQYLTVVPQILQQLWQDNQPEVWEGPDEDASKYFEPVMWKSFSHVCTAPVESTETWEDEGKGDPESKGAQIVTGAQLDVLQCGSKKVLYLKLLYSKIHKARVRRYEWDHMPASQQKSGIFSTLMSTTFSSAQASPQKPVQVVVNSAIYPQGPPAANSQAPKLLKFVDTAEMTRGPLDLPGHWLVTGAKLFVDRGKIAVRAKYSLLLYSVD

SEQ ID NO: 332 - protein, 609 aa, Nephrolepis falcata
MASKRDIPNAAKVANSAIQSLGRGYDLTCDLRFSTFKDVNGASLIELRSNETRELSLPGSVVVTNVPAIVKCDKGEQTHFRSDILTFDQMSQQFNQGLSISGKIPSGLFNYMFNFTGSWQKDASTTKHLALDGWFYTLYTVEIPRSQLVLKEDIKASVPTSWEAAALAKFIETFGTHIIVGAKIGGKDVVYMKQHQSSPSTSIDFQKLLVEVSDERFSQTEGRTSVGSKDGRINKKKRGIEFQSWAAHLDTFSQITYNEKHHVTIIPRRKGGFDHGQSHSDWIRTVPLAPDVISVSLIPITSLLHGVSGSGFLSHAVNLYLRYKPPIEELRQFLEFQFPREWAPVFSELPLTLSRREHGVSTLQFTLMGPKLKVSKLQVTVGKKPVTGMRLFLEGKRCDKLAIHLQHLSAIPRFLQPLWEDHPFAREVTWQDPDDCSTKYFEPVQWKNFSHVCTAPVENMETWIGDHAGASVVIGAQLAVKSFGLRNVLYLRLLYSKIPEAKIRRSEWDHMPASTQKSGMFSSFLSSTFSSAPAPAKVPAVVINSGIYPEGPPKPVRDPKLLKFVDTTEMTKGPQDMPGHWLVTGAKLYLDKGKISLRVKYSLLTVSSD

SEQ ID NO: 333 - protein, 320 aa, Celosia argentea (Sylphid)
MALKLSAAKAAEVAIGSIGRGYDISADLRLKFCKGDTLDSHLIEIDEDHCQEIALPGGISIPNVPTSIKCDKGERTRFRSDVLSFQQMSEQFNQEISLTGKIPSGLFNTMFEFSGCWQKDAAYTKTLAFDGVFITLYTVALEKSQLVLRDHVKQAVPSSWEPAALARFIEKFGTHIIVGIKMGGKDVVFVKQQHSSSLQPAEVQKKLKEIADKRFLEANGQSEFNAGHIYQDGKFDAREQRLRFADLSPSCSYSHKEDIVTICKRRGGSDIKNLPHHEWLQTVQSEPDVISMSFIPITSLLNGVPGSGFLSHAINLYLRC

SEQ ID NO: 334 - protein, 383 aa, Onoclea sensibilis
MASKHDIPNAAKVANIAIQSLGRGYDLICDLRFSSCKDVHGAPLIDLSNKETHKLSLPGGVVVANVPTIVKCDKGERTHFRSDILTFDQMSQQFNQGLSLSGKVPCGLFNYMFNFTGSWQKDASTTRHLALDGWFYTLYTVEIPRSQLVLKEDIKASVPTSWEPAALARFIETFGTHIIVGAKIGGKDVVYMKQHQSSPSTSIDFQKLLAEVSDERFLQTESRASVGSKDSRSNKKHSVEFQSWSAHLDTFSQIIYNEKHHVTIIPRRKGGFDHGQSHSEWIHTVPLAPDVISVSLVPITLLLNGVAGSGFLSHAVNLYLRYKPHIEELRQFLEFQLPREWAPVFSELPLTLSRREHSPSTLQFTLMGPKLKVSKLQKCLLCR

SEQ ID NO: 335 - protein, 378 aa, Asplenium australasicum
MASKHDIPNAARVANLAFQSLGRGFDLTCDLRFSSCKDVHGAPLIELSDKDLRKVSLPGGVIVPNVPTIVKCDKGEQTHFRSDILTFDQMSQEFNHGLSLSGKVPSGFFNYMFNFTGSWQKDASATRHLALDGWFYTLYTLEMPRSQLVLKEDIKAAIPTSWEPAALARFIETFGTHIIIGAKIGGKDVVYLKQHQVSTSTLADFQKLLAEVSEERFSQTEGRASVGSKDSHSNNKRSMQFKSWTAPLDSFSQIIYNDKHHVTIIPRRKGGFDHGQSHSDWVHTVPLAPDVISVSLVPITSLLNGVPGSGFLSHAVNLYLRYKPPTEELRQFLEFQLPREWAPVFSELPLTLCRREQSPSTLQFTLMGPKLKVNKSQR

SEQ ID NO: 336 - protein, 415 aa, Asplenium australasicum
MASKHDIPNAARVANLAFQSLGRGFDLTCDLRFSSCKDVHGAPLIELSDKDLRKVSLPGGVIVPNVPTIVKCDKGEQTHFRSDILTFDQMSQEFNHGLSLSGKVPSGFFNYMFNFTGSWQKDASATRHLALDGWFYTLYTLEMPRSQLVLKEDIKAAIPTSWEPAALARFIETFGTHIIIGAKIGGKDVVYLKQHQVSTSTLADFQKLLAEVSEERFSQTEGRASVGSKDSHSNNKRSMQFKSWTAPLDSFSQIIYNDKHHVTIIPRRKGGFDHGQSHSDWVHTVPLAPDVISVSLVPITSLLNGVPGSGFLSHAVNLYLRYKPPTEELRQFLEFQLPREWAPVFSELPLTLCRREQSPSTLQFTLMGPKLKVNKSQVTIGRRPVTGMRLFLEGKRCDRLSIHLQHLSEIGRAHV

SEQ ID NO: 337 - protein, 624 aa, Equisetum
MERESMESHEAAQHLDVANNSSHSNLSCKVGRQALECLGQGFDVTADFRLRYCKPLGSKGSLIKLGSGQCQKVKLPGDIVREIPACIKCDKGERIRFTSDVMQFSQMAEFFNHHSSIEGKIPLGSFNAVYQLSGLWQTDATLVKRLAFDGCFITLYTMKLSRNLVLKDEVLADVPSTWEPEALTRFIMKYGTHIVVGVRVGGQYVLYLKVNQSSLLSSTEIHEKLKRLGDEIFNDSSSNNIIFSRERNNQVAYTPTAVIHSAQPPIVTKDCTIIPSKRGGNLHADTYKEWQSTVDSNPDVISLSFVPITSLMSGLPGKGFLNHAINLYLRYKPKIEELQYFLEFQIPRQWAPIYGELSLGPPRTQAPSASMRFSFMGPVLYVNTSQVWVCKKPVTGVRLYLEGRKNNRLAIHLQHLSNMPQAVLQCMGGEEPSIWHGTVDLLDRVNRYMEPVQWKRFSHVCTAPVRYNPEWLESNQQRGGVYIVTGAQLLVKGSGFKKNLHLRLQFTRIPCATIQKSTWEQPSNSTQKSTFFSAISTPFGIPAAKKAAEKSPPPVMVNSGVFFGSPPSPVQTPRLLKYVDTTELTKGPQDLPGHWLVTAAKLCLEQGKISLRVKYSFLNYQEFD

SEQ ID NO: 338 - protein, 592 aa, Celosia argentea (Sylphid)
MALKLSAAKAAEVAIGSIGRGYDISADLRLKFCKGDTLDSHLIEIDEDHCQEIALPGGISIPNVPTSIKCDKGERTRFRSDVLSFQQMSEQFNQEISLTGKIPSGLFNTMFEFSGCWQKDAAYTKTLAFDGVFITLYTVALEKSQLVLRDHVKQAVPSSWEPAALARFIEKFGTHIIVGIKMGGKDVVFVKQQHSSSLQPAEVQKKLKEIADKRFLEANGQSEFNAGHIYQDGKFDAREQRLRFADLSPSCSYSHKEDIVTICKRRGGSDIKNLPHHEWLQTVQSEPDVISMSFIPITSLLNGVPGSGFLSHAINLYLRYKPPLEELHQFLEFQLPRQWAPVFSELPLGPQRRQQNYASLQFSFMGPKLYVNTIPVDVGSRPVTGLRLYLEGRKSNRLAIHLQHLSSLPKIFQLKDDPSGNFHQLHYDRRFYEKVGWKNFSHVCTAPVESDEDLSIVTGAQLQVGDYGFKKVLFLRLRFSTVLGATLVKNPEWDGSPGLARKSGLISTLISQHFTAVAKPLPQPADVNINSAVYPGGPPVPVQAPKLLKFVDTTEMTRGPQDTPGYWVVSGAKLVVEKSKISIRVKYSLLTP

SEQ ID NO: 339 - protein, 526 aa, Prostanthera rotundifolia
MRFSSDVLSFQQMSEQFNQELSLSHKIPTGHFNAAFEFTGSWQKDAAFTKSLAFDGVFITLYSIALEKSQVTLQDHVKQAVPSSWDPAALARFIEKYGTHIIIGVKMGGKDVVYVKQHYSSPLQPIDVQQRLKDAADKRFSDANGQSSMHPEKSYGREMPVSNERGFAFSDPGTPSFHSNQEEFTFFWRRRGGGSDRNMPHTKWSQTVQIEPEVISMSFIPISSLLSGIDGSGFLGHAINLYLRYKPPIEELHQFLEFQLPKQWAPVFGNVPLGPDRKQQGAASLQFSLMGPKLYVNTEEVDVGNKPVTGLRLYLEGKRSNCLAIHLQHLSSLPKSFQLRNESGGNSNSSDRRYYEKVQWKSFSHVCTAPVESDDDLSIVTGAQFEVKESGMKNVLFLRLRFSKVTGATVVKKPEWDGSPALSQKSGIISTLISSHFSTGQKPGPKPSDVNINSALYPDGPPMPAQTLKLLKYVDTVEMTRGPQDPPGYWVVSGARLVVDKGKISLRVKYSLLAVILPDEEALLQG

SEQ ID NO: 340 - protein, 656 aa, Tupidanthus calyptratus
MAFNANRFDPQSAAEKAVSAIGSGYDLTVDIRLSECKPGPSGSGLIELDRTLTKDLNLPCGRVVRNVSPSIKCGKGEQTRFHSDVLTFVQMSEQFNQDISLSGKIPSGLFNAMFDFKGCWQKDAATTKSLAFDGWFFSMYNIELARSQITLSEQVKKEVPSSWDPAALAEFIEKYGTHIVVGVKMGGKDVIHLKQLQNSNLQPTEVQKLLKQLADERFSEDVNGSLIPNPEKSSGKQKEEPSIVQDLNLPFANLLRQAVVSQSKNDDLLSIRIRRGGFDTGQSHKQWLSTVSQFPNAISMSFVPLASLLSGIRGSGFLSHAINLYLRYKPPMEELEQFLEFQVPRQWAPVYGDLPLAPRRKKQASPSLKFTFMGPRLYVNTIRVDSENRPVTGIRLYLEGKKSDHLAIHLQHLSTLPKILQLSEDLSYEPIDEPAEKGYLEAVKKSDHLAIHLQHLSTPPKRLQLSDDLSYEPIDEPAEKGYLEAVKWSMFSHICTQPVQYNGARIDDSASIVTKAWFEVKGIGMKKVLFLRLGFSTVASAVIRRSEWDGPTMSTRKSGLMSMLISTRFSTGLTEKPELRKKLDLNSAIYPEGPPLPTRAPKMLSFVDTKETVRGPEVPPGYWVVTGAKLCVEGGRIRVKVKYSLLTIMSEDSLFI

SEQ ID NO: 341 - protein, 609 aa, Polypodium formosanum (Cristatum)
MASKPGIPNAAKIAHLAIQSLGRGYDLTCDLRFSSFKDVNGASFIDLKNNETIDLSLPGGVVIANVPAIVKCDKGERTRFRSDILSFDQMSEQFNHGLSLSGKIPCGLFNNMFSFTGSWQKDASTTKHLALDGWFYTLYTVEMPRSQLVLKKDIKASVPSSWEPAALARFIETFGTHIILGVKIGGKDVVYMKQHQSSPSTSIEFQKLLAEVSDERFLQTEGRASVGSKNSHSNKKHNIEFQSWSAHLDTFSQNIYSEKKHHVTIVPRRKGGYDHGQGHSDWIHTVPLAPDVISVSLIPITFLLHGVSGSGFLSHAVNLYLRYNPPIEELRQFLEFQLPREWAPVYSELPLTLPRREPSLSTLQFTFLGPKLKVCKLEVAVGKKPVTGMRLFLEGKRCDKLAIHLQHLSAIPRFLQPLWEDHPFAKEITWQDPDDYSTKYFEPVQWKNFSHICTAPVENTETWIGDHAGASVVVGAQLAVKSFGLRNVLYLRLLYSKIPEAKIRRSEWDHMPALAQKSGMFSSFLSTTFSSTPAPPKAPAVVINSGIYPEGPPKPVRDPKLLKFVDTTEMTKGPQDMPGHWLVTGAKLYLDKRKISLRVKYSLLTISSD

SEQ ID NO: 342 - protein, 515 aa, Prostanthera rotundifolia
MSEQLNQELSLTGKIPSGLFNAMFEFSGCWQKDAAYTKTLAFDGMFITLYTVALEKSQMVLKDHVKKEVPSSWEPAALARFISKFGTHVVVGVKMGGKDVIYVKQQHGSSLQPADVQKRLKLMADKRFLDANGQNELGSEQIYQNEKFEMKETRLRFADTGTSSSYSHKDDIISICKRRGGSDGVNLTHNEWLQTVLLEPDVISMSFIPVTSLLTGVSGSGYLSHAINLYLRYKPPIEELHQFLEFQLPRQWAPIFSDLPLGPQRRRQNTASLQFSLMGPKLFINTTAVDVGKRPVTGLRLYLEGKRSNRLAIHLQHLSSLPNIFQLEDDPNGNFRQESYDRKYYEKVQWKNFSHICTAPVESDEELSIVTGAQLQVGDYGFKKVLFLRLHFSSVKGAISVKYPEWDGSPGLARKSGLISTLISHHFTAVQKPPPQPADVNINSAVYPGGPPVPIQTPKLLKFVDTTEMTRGPQEPPGYWVVSGARLVVEKGKISLRVKYSLLTVIQPDDDLLPE

SEQ ID NO: 343 - protein, 607 aa, Marsilea mutica
MTTTTSRPNSVATAEQAVRCLGKGYDVVNDLWFRYCKGDDRLIEIDQSRPSQELVLPGNITLSEIPACVKCDQGDLTRFATDVISFNEMSEHFNKSLSITGKIPLGHFNSMFQFSGSWQKDASSVKALAYDGVFKSLYSLQMPTTLLTLKEEVKASMPSSWDPRALANFIENYGTHIIVGVTIGGRDVVCLKQLHGSSLSGDRVRKFLESSANERFLASGVSSHNAKGNSHKDDIGYNFINNVAMNEETILKDDMVNIIRKQRGGKQCLQSHKEWLQTVKDFPDILSMHFVPITSLLTGVTGSGFLNHAINLYLRYKPPIEELRYFLEFQLPKEWAPAFGDLPLGPPRKQIESPALQFRFMGPKLQVNTTQVTVGKRPVTGIRLHLEGVKGNRLAIHLQYLTVVPQILQPLLEENKDIEGQWHGPESDGDYSKYFEPVMWKSFSHVCTAPVETIDAWSEEDVDATIVTGAQLRVEQHGTKKVLVLWLLYTKIPKVGIRRPEWDHSPASQQKSGIFSTLLSTTFSSQQAQTVNKPAVQVNINSAINPYGPPTAKTHSPKLLKLVDTNEMTRGPTCQPGHWLVTGAKLAVENGKIAIKPKYSLLMYRTE

SEQ ID NO: 344 - protein, 506 aa, Waldsteinia ternata
MRPVSNAASIKCLGVDGYFIVFFSVHINRSPLVLADEVRDSVPSSWDPVAISRFIENYGTHIVVGLSVGGQDVMLVKQDKSSDLGPSELKKHLNELGDQHFTGTCSFSPLHSKTKDHKHRLTPQAFNVFDAPQSVAINGFSTAHTKDGITVISSKKGGDPSASSHSEWLLTVPSRPDAIHFSFIPITSLLKGVPGKGFLSQAINLYLRYKPPIADLPYFLEFQVSHKIWAPMHNDLRLGPATNSKSNPSSPAIYFSLMGPKLYVNTTQVKVGNCAPVTGMRLFLEGMKCNRLAIHLQHLANTPLMLENKIDDTSSWRGSEEVTDHGYFEAINGNKFSHVCTAPVLYDLEWTSPSSINSAFIVSGAQLVVKQHGSKSVLHLRLLFSKVLDYFIVQSVWGESSCSSSRSSSSSGLLDAISRPVSGGYWAKEKVEPAGEQVILDSSVFPAGPPVPLPSQKFVKYVNTSHVCKGPQNSPGHWLVTGARLNLVQGKIGLQVEFSLLNAVEY

SEQ ID NO: 345 - protein, 521 aa, Adiantum pedatum
MSEHFNQGLSLSGKIPCGFFNNMFNFSGLWQKDASTTRHLALDGWFYTLYTVEIPRSQLVLKEDIKALVPASWEPVALARFIETFGTHIIVGAKIGGKDVIYMKQHQSSPATSVEFQKLLAQVSDERFLQNEGRTSVGSVDNRSHKKPTIEFQSWSAHLDTFSQIVYNDKHHVTIMPRRKGGVDHGQSHSEWIHTVPLSPDIISVSLVPITFLLSGVAGSGFLSHAVNLYLRYKPPVEELRQFLEFQLPREWAPVFSDLPLTLSRKEHSPSTLQFALLGPKLKVSKMQVTVGKKPVTGMRLYLEGKKCDKIAIHLQHLSAIPRFLQPLWEDHPFAGEATWQDPDDYSTKYFEPVQWKNFSHVCTAPVESTETWIGDHAGASVVIGAQLAVKSFGLKNVLYVRLLYSRIPEARIRRSEWDHMPATTQKSGMFSTLLSTTFSSTAAPALAKASPVVLNSGIYPDGPPKPVQDPKLLKFVDTTEMTKGPQDMPGHWLVTGAKLYLDKKRISMRAKYSLLTVGSD

SEQ ID NO: 346 - protein, 342 aa, Bignonia chamberlaynii (Bureau)
MAYYSSSNVRMDPQLAAEKAVSVIGFGYDLTSDIRLSACKPGPSGSGLIELDRTRRKDLVVPGNVVVPNVSASIKCDKGERTRFSCDALSFSQMSEHFNQELSLSGKIPSGMFNAMFGFKGCWQSDASTTKILAFDGWFISLYRIELERSQITLSDKVKQEVPTTWDPAALAEFIDKYGTHVVVGVKMGGKDVIHIKQLQNSNLQPTEVQKLLKQLADERFCEDGNRNSVANANVSSGKPKVEQSMMWDLPLPFASTVRPPIVSHSKNNDLLSIHIRRGGLDVGQSHNQWLSTVSQHPNVISLSFVPIASLLSGIRGSGFLSHAINLYLRCEYNKLIQDLLR

SEQ ID NO: 347 - protein, 621 aa, Nephrolepis cordifolia (Duffii)
MASTKEAAALAAVKALGCGFDLTSDYRLKYKKGPLLHLQHSYTKDLTIPGGITIPDVVRDVKCDKGERIRFASEIMQFQQMSQFFNQNSSIEGKIPLGLFNAMFDLSGSWQDDANRIKNLAFDGCFITLYKLHLTRSNLVLQEEVKNDIPSVWDPQRLAKFIEKYGTHIIVSASIGGQDVLYLKENSSSLLSAQDLHKKLKSAGEEYFSDKGAKGNTSFKDSETSPLNALHSHQFRALAPSAQLFISNKDYTIISQRRGGYFFAKNHCEWQETVNSYPEAISLSFVPITSLNHCEWQETVNSYPEAISLSFVPITSLLLGIAGSGFLQHAINLYLRYKPPVSDLQYFLDFQVPRQWIPIHNELPLRLARKQVFSPSLQFSLTSPKLYVNNNEVVVNRKPVTGVRLYLEGRKSNKLAIHLQHLSVLPQSLGQFWSESTQMELPRWNGSNDAPNDWFEPVEWKCFSHVCTQPIKYKPEWLNERGGAFVVTGARLDVKAHGLKSILHLHLLFSKIPGCTIQRSRWNEHPAAEKAGFFSSISTTFSATTKTGKKGPPVVVDSAIFMEGPPRPIQSPKLLKFVDTTELTKGPQDAPGHWVITAARLELEKSKISLRAKFSLLNYTE

SEQ ID NO: 348 - protein, 635 aa, Stenochiaena tenuifolia
MASVDGGFVAMQAQSSKGMPKNTAFQVAQHAVDSLGRGYDVNADLWLRYCKRSERLIENDDSGPKQDLLLPGNIIIPNVPSSIKCDKGDRMRFTSDVLTFSEMSEQFNQTLSISGKIPVGHFNSMFGFSGSWQKDASQVKTLAMDGVIINLYSVELPREQLTLKEEVRAAVPSSWDPAALASFVEKYGTHVIVGIKIGGKDMICLKQHRSSSLPAVGVQKILEAKAKERFSSVESSAIKEKVNKGKIRDGSTYELNGMNAAFGSTDGMPLSWMNDSAPEIETDDVTVIFKRKGGRDISLSHEDWLHTVPSAPDIVSMSFIPITSLLNGVAGTGFLSHAINHYLRYKPPIQELRYFLEFQLPKEWAPAFGDLPLGPPRKQQDSPSLQFRLMGPKLQVNTTPVFIGKRCVTGLRLHLEGKKSNRLAVHLQYLTVVPQILQRLWEDDQPEEWVGPDDDFSKYFEPVMWKSFSHVCTAPVESNETWVDESRGENALKGALVVTGAQLNVEQHGSKKVLFLRLLYSKIHKATVRRSEWDHTPASQQKSGIFSTLLSTPFSSQAAPVKPVQVVVNSAIYPDGPPAAKSQAPKLLKFVDTTEMTRGPLDLPGHWLVTGAKLFVDRGKIAVRAKYSLLLYSED

SEQ ID NO: 349 - protein, 628 aa, Aglaomorpha (Roberts)
MASAKDAAALAAVEALGCGFDLTSDYRLKYKKGSLLELQRSHNKDLTIPGGITIPDVSRDIKCDKGERMRFASEVMQFQQMSQWFNQNASIEGKIPLGLFNAMFDLSGSWQDDASRLKSLAFDGSFITLYKLHLTRSNLVLREDVKKDIPSVWDPKSLAKFIEKYGTHIIVSASVGGQDVLYLKENDSSLLSAQDIRKKLKSAGDDYFSENSGKRNTDFKDSETLPLNSQPFRGTIAASAQLLISNKDYTVLSQRRGGYYFAKTHCEWQETVNMYPEAISLSFVPITSLVLGAAGSGFLQHAINLYLRYKPPVSDLQYFLDFQVPRQWIPVHNELPLRLARKQAFSPSLQFSLMSPKLYINNNEVVVNKKPVTGIRLYLEGRKNNRSLMSPKLYINNNEVVVNRKPVTGIRLYLEGRKNNRLGIHLQHLSVLPQSLGQFWSEGTQIESPQWNGSNDAPNDWFEPVEWRCFSHVCTQPIKFKSEWLNERDSAFVVTGARLDVKAHGLKSVLHLHLLFSKIPGCTIQRSRWDQHLAAEKTGFFSSISTTFSTTTKAGKKSPQVVVDSAVFMGGPPRPIQSPKLLKFVDTAELIKGPQDAPGHWVVTAARLELDRGKIAIKVKFSLLNYAE

SEQ ID NO: 350 - protein, 296 aa, Tupidanthus calyptratus
MSSSTSTSSSSSSSGDGIVWRAINSLGKGFDLTSDFRLKYCKGNHPLVLLNQTHTKQLLVPGFGYFNHVSSDINCGKGERTRYQSDILDFNQMSEFMNQRSSVPGKIPSGLFNSMFGFESESWAKEAASTKCLGLDAYFISLFHLRINRYPLVLCDEVRNAVPSTWDPSALARFIEKYGTHIIVSLGIGGQDTVVVRQDKSSNLEASDLKKYLDQLGDQLFTGTCTFTPKDQQRKGVKVIFSKRGGDISANTHSEWLLTVPSMPDAVNFCFIPITSLRGMQRLYITCHQPLSLFWK

SEQ ID NO: 351 - protein, 346 aa, Symphoricarpos x chenaultii (Hancock)
MLSIHIRRGGIDNCQSHNQWLSTVSRSPNVISMSFVPIASLLSGVRGSGFLSHAINLYLRYKPPIEELQQFLEFQLPRQWAPAYGDLPLASRRKKQPSPALQFTFMGPKLYVNTVKVDSGNRPVTGVRLYLEGKKSDHLAIHLQHLSTLPEILQLSDDLSYEPIDEPVERGYFEPVKWSIFSHICTAPVQYNGARIDESASIVTKAWFEVKAVGMKKVLFLRLGFSMVASARIRRSEWDGPTSSSRKSGLISMLISTPFSTGLNQQQKKPEKVDLNSAVYPGGPPLPTRAPKMSHFVDTKEMVRGPEDPPGYWVVTGAKLCVEGGRIRIKVKYSLLTIISDDSLFM

SEQ ID NO: 352 - protein, 610 aa, Celosia argentea (Sylphid)
MEDWWEEREKKPIELRAVEALGLGFDLTSDFRLKFAKKERLVVLDEAHKRDVVIPGANVSIPGVSVDIRCDKGEQLRFKSDVLQFNQMSELLNQRSSVQGKVPSGYFNAIFNFSGAWLNDATECKHLAFDGYFVALYHLHLMASSIVLQEKVKKSVPSHWDPASLSRFIQKYGTHIIVGLAVGGQDLICVRQTPSSEIPPAELRAHLEDVGDALFSDGKDPLLQRKARDGKQKAPEVFRRILQSNIIQLTSVVETSNKDGLSVIRSRRGGDVFLHSHSQWLQTVPSHPDAIHFKFVPITSLLTGIPGSGYLSHAINLYLRYKPAPEDLQYFLEFQVPRQWAPMYNELPLQHRRMTTSSSLLQFSLMGPKIHVNSTKVLSSLKPIVGLRLYLEGKNCNHLAIHAQHLTTLPNSMAFSSPHEHSQWRGSDEFDPEGQFLEPIRWKRFSRVCTSIVKHDPNWLQGKTTGVYIVTGAQLLAKGRWPKTVLHLRLLFSHLPNCTIRKTEWAAAPQGSHKTSILMTLSTTFTFTQKQNNSPPKKLPAALNSGVYPNGPPVPVKCEKLLKYVDASEVLRGPHDAPGHWLVTAAKLVTDGGKIGLHVKFALIDYTNDL

SEQ ID NO: 353 - protein, 601 aa, Adiantum trapeziforme var braziliense
MASEREAARTAALVAVESLGCGFDLTSDYRLKYRKGPLVQLQHNSNKDLTIPGGITIPEVSRDVKCDKGERMRFASEVMQFQQMSQWFNQNASVEGKIPLGLFNAMFDLSGSWQDDASQIKNLAFDGCFITLYKLHLTRSNLVLRDDVINDVPSVWDPQALARFIEKYGTHIIVSASVGGQDVLYLKENQSSLLSPKDIHKQLKSAGDDYFLDKDADRILNVKDSETLPLNSLKSQPSRATVAHIHSSHLFIRNKDFTLISQRRGGHYFSKSHSEWQETVNVFPEAISLSFVPITSLLLGVAGCGFLQHAINLYLRYKPPVSDIQYFLDFQVPRQWIPIHNELPLRLARKQGFSPSLQFSFMGPKLYINSSEVVVARKPVTGLRLFLEGRKSNRLAIHLQHLSVLPQSLGKFWSEDTYKDLQRWNGSNDAAKDWFEPVEWKCFSHVCTQPVKYKPEWLDVKGSAFVVTGARLEVQVHGLKSVLHLHLLFSKIPGCVIQRSRWDQPPATEKTSFFSSLSTTFSSAAKPGKKGPPVVVDSAVFVGGPPRPIQSPTLLKYVDTTELTRGPQDAPGHWVVTAARLELDKSKISLRVKFSLLSYLD

SEQ ID NO: 354 - protein, 648 aa, Tupidanthus calyptratus
MAFNANRFDPQSAAEKAVSAIGSGYDLTVDIRLSECKPGPSGSGLIELDRTLTKDLNLPCGRVVRNVSPSIKCGKGEQTRFHSDVLTFVQMSEQFNQDISLSGKIPSGLFNAMFDFKGCWQKDAATTKSLAFDGWFFSMYNIELARSQITLSEQVKKEVPSSWDPAALAEFIEKYGTHIVVGVKMGGKDVIHLKQLQNSNLQPTEVQKLLKQLADERFSEDVNGSLIPNPEKSSGKQKEEPSIVQDLNLPFANLLRQAVVSQSKNDDLLSIRIRRGGFDTGQSHKQWLSTVSQFPNAISMSFVPLASLLSGIRGSGFLSHAINLYLRYKPPMEELEQFLEFQVPRQWAPVYGDLPLAPRRKKQASPSLKFTFMGPRLYVNTIRVDSENRPVTGIRLYLEGKKSDHLAIHLQHLSTLPKILQLSEDLSYEPIDEPAEKGYLEAVKWSIFSHVCTQPVQYTPKRLQLSDDLSYEPIDEPAEKGYLEAVKWSMFSHICTQPVQYNGARIDDSASIVTKAWFEVKGIGMKKVLFLRLGFSTVASAVIRRSEWDGPTMSTRKSGLMSMLISTRFSTGLTEKPELRKKLDLNSAIYPGGPPLPTKAPKMSSFVDTKEMVRGPEDPPGYWMVTGRAHPCQQEPQKCCLLWIRKKR

SEQ ID NO: 355 - protein, 265 aa, Tupidanthus calyptratus
MEEEGGKPIEVIAMESLGLGFDFASDFKLKFAKRCPDGAGDDGRLVVIDEANKRDVVFPGGGVIRGVPESIRCGKGDRIRFKSDVLKFNQMSELINQKSSVQGKVPSGYFNAMFDLSGSWFNDAADSNHLAFDGYFITLYCLHLTASPLVLRDKVKKSVPSHWNPASLSRFILTYGTHIIVGLAVGGQDVICVKQRPSSGIPPAELRGYLEDLGDCMFSDGRNPVLERKTRDGKQKVPEVFNRMLQSHTMQFSSITETSSKDVRL

SEQ ID NO: 356 - protein, 678 aa, Lygodium japonicum
MKPAAATIRPNFFTSSSSSAPSDPASVAKQAVDALGRGYDVTGDLWLSKCREPLIVDLAESSPTQDLAIPGGISLPCVPAPIKCDKGDRTRFASDILSFSEMSEQFNKTLSIAGKIPLGLFNSMFGFTGLWQKDASSTKTLGLDGVFINLYSVEVPRTHLTLREEVRKAVPSSWDPAALASFVEKYGTHVIVGVKIGGKDVVYIKQRHSSTLSGVSIQKILETKALERFSSGETCTSKEKLTKGKHSSTLSAVSIQKILETKALERFSSGETCTSKEKLTKGKDFQTKGIHGAEPNGQNGNLLRGHVDGIENSESFSLMEDSSTFSVDGDVTVIYKRKGGRESCQSHNDWLHTVPLAPDVVSMSFVPITTLLNGVPGTGFLSHAINLYLRYKPPLQELSNFLEFQLPKEWAPAFGDLPLGPPRKQQEVPSLQFRLMGPKLHINTTPVVVGKRPVTGLRLYLEGKKSNRLAIHLQYLTAVPQILKTLWVEDGGGEEEWVGPEEDFSKYLEPVQWRNFSHVCTAPVENSETWLGGPGGALVVVGARLQVQQYGAKKVLFLHLLYSRIAKARIRRSEWDHMPASQQKSGLFSTLISTTFSSAAAQSPAPPKPVVINSAIYPEGPPVPGQMPKLLKFVDTTEMTRGPHDLPGHWLVTGAKLLLERGKISLRAKYSLLLYSVE

SEQ ID NO: 357 - protein, 608 aa, Platycerium wandae
MASKLDIPNAAKVAHLAIQSLGRGYDLTCDLRFSSFKDRNGTSLIELRNDETVKLSLPGGVVIADVPAIMKCDKGERTRFQSDILTFEQMCQQFNQGLSLSGKVPCGLFNNVFNFTGSWQKDASTTKHLALDGWFYTLYTIEMPRSQLVLKENIKSSVPTYWEPAALARFIETFGTHIIVGVQIGGKDVVYMKQHQTSPSTPIEFQKLLTEVSNERFLQTEGRASIGSKDSRSNKKRNVEFQSWSAHLDTFSQMIYNEKHHVTIIPRRKGGFDHGQSHSEWIHTVPLAPDVISVSLIPITFLLHGVAGSGFLSHAVNLYLRYNPPIEELRQFLEFQLPRAWAPVYGELPLTLPRRESSLPTLQFRLMGPKLKVSKLEVAVGKKPVTGMRLFLEGKRCDKLAIHLQHLSAIPKFLQPLWENHPFGREVTWQDPDDYSTKYFEPVQWKNFSHVCTAPVENTETWIGDHAGASVVVGAQLAVKSFGLRNVLYLRLLYSKIPEAKIRRSEWDHMPASTQKSGMFSSFLSTTFSTTPVPPKVPAVVINSGIYPEGPPRPVRDPKLLKFVDTTEMTKGPQDMPGHWLVTGAKLYLDKRKISLRVKYSLLTVSSD

SEQ ID NO: 358 - protein, 623 aa, Aglaomorpha (Roberts)
MASAKDAAALAAVEALGCGFDLTSDYRLKYKKGSLLELQRSHNKDLTIPGGITIPDVSRDIKCDKGERMRFASEVMQFQQMSQWFNQNASIEGKIPLGLFNAMFDLSGSWQDDASRLKSLAFDGSFITLYKLHLTRSNLVLREDVKKDIPSVWDPKSLAKFIEKYGTHIIVSASVGGQDVLYLKENDSSLLSAQDIRKKLKSAGDDYFSENSGKRNADFKDSDSSLLSAQDIRKKLKSAGDDYFSENSGKRNTDFKDSETLPLNSQPFRGTIAASAQLLISNKDYTVLSQRRGGYYFAKTHCEWQETVNMYPEAISLSFVPITSLVLGAAGSGFLQHAINLYLRYKPPVSDLQYFLDFQVPRQWIPVHNELPLRLARKQAFSPSLQFSLMSPKLYINNNEVVVNKKPVTGIRLYLEGRKNNRLGIHLQHLSVLPQSLGQFWSEGTQIESPQWNGSNDAPNDWFEPVEWRCFSHVCTQPIKFKSEWLNERDSAFVVTGARLDVKAHGLKSVLHLHLLFSKIPGCTIQRSRWDQHLAAEKTGFFSSISTTFSTTTKAGKKSPQVVVDSAVFMGGPPRPIQSPKLLKFVDTAELIKGPQDAPGHWVVLIAELCRVESEDIVLLQGS

SEQ ID NO: 359 - protein, 335 aa, Waldsteinia ternata
MRMEEATTEKPIEVRALEALGQGFDLSSDFRLKFAKGLDGSKGRLVVLNEESKRDIVIPSGSGGGVVIHGVPQDIHCDKGDRIRFKSDVLEFNQMSELLNQKSSVQGKIPSGYLNSIFGLSGDWLQDAAETKYLAFDGFFISLYNLHLTASPLVLRNKVQKSVPSRWDPAALSRFIHSYGTHIIVGMAVGGQDLVCVRQKSSSPVPPADLRRNLEDLGDFLFSDGPSLLRGKTRNGKQKIPEVFDRILQSNTMQLTTISETSSKDGLTVVCSKRGGDVFLNSHSNWLQTVLAEPEAIIFKFVPITSLLTGLPGSGYLSHAINLYLRCKYSTPYQN

SEQ ID NO: 360 - protein, 639 aa, Polystichium tsus-simense
MASAVGALPLQSSEAAPSQNIPSLAFSVAQQAVDALGHGYDVNSDLWLRYCKRGERLIENDKSGPTQDLLLPGNIAIPNVPTSVKCDKGDRTRFTSDILTFNEMSEQFNQNLSISGKIPVGHFNAMFGFSGSWQKDASLVKNLAMDGVFINLYSVELPRAQLTLKEEVRAAVPSSWDPAALASFVEKYGTHVIVGVKIGGKDVICLKQHRSSSLSAVGVQKILQSKAKERFSSVDGCAAKEKINKGKIRDGSTYGSNGMNAVNGLKDGIPLPWISDSSTDLSAVETDDVTVLFKRKGGRDVQSHDEWLHTVASAPDIVSMSFVPITSLLNGITGTGFLSHAINHYLRYKPQIQELHHFLEFQLPKEWAPAFGDLPLGPPRKQAGSPSLQFRMMGPKLQVNTTPVVIGKRCVTGLRLHLEGKKSNRLAVHLQYLTVVPQILQQLWEDDQPEQWEGPEDDFSKYFEPVMWKSFSHVCTAPVESSETWEDEGRGEAGPKGALVVTGAQLDVEQYGSKKVLFLRLLYSKIHKARIRRSEWDHTPASQQRSGLFSTLMSTTFSSAQSAPQKAVQVVVNSAIYPQGPPPAKSQAPKLLKFVDTTEMTRGPLDLPGHWLVTGAKLFVDRGKIAVRAKYSLLLYTVD

SEQ ID NO: 361 - protein, 279 aa, Tupidanthus calyptratus
MAFNANRFDPQSAAEKAVSAIGSGYDLTVDIRLSECKPGPSGSGLIELDRTLTKDLNLPCGRVVRNVSPSIKCGKGEQTRFHSDVLTFVQMSEQFNQDISLSGKIPSGLFNAMFDFKGCWQKDAATTKSLAFDGWFFSMYNIELARSQITLSEQVKKEVPSSWDPAALAEFIEKYGTHIVVGVKMGGKDVIHLKQLQNSNLQPTEVQKLLKQLADERFSEDVNGSLIPNPEKSSGKQKEEPSIVQDLNLPFANLLRQAVVSQRRNHLLSRISICHLQTC

SEQ ID NO: 362 - protein, 604 aa, Verbascum chaixii (Vill)
MAMKSVEMRATEALGQGFDLASDFRLKFVKKCPNGGRLLLLNEQNKRDVVVPGGVTIPDVPECIRVDKGDHIRFKSDVLQFNQMSELLNQKSSIPGKVPSGYLNAIFDLTGTWLNDAADAKHLAFDGYFISLYYLHLTASPLVLHDHVKKSVPSRWDPAALSRFIQTYGTHIVVGMAVGGQDLLCVKQRPSSPIPPAELKGYLEELGDCLFSDANSPMLERRAKDNKNKVPEVFNRMLQAHTMQFTSITETSSKDGLTLIWSKRGGDVFAQSHSRWLQTMSANPEALLFKFVPITSLLNGIPGSGYLSHAINLYLRYKPTIEDLPYFLEFQVPSQWAPLFCELPLRHQRRKTSFPSLQFSFLGPKMYVSSTQVTSDQKPVVGLRLYLEGKKSNRLAIHVQHLSSLPNIMALGSTTLKPQWRGSDDYESHDQFLEAVRWKRYSNVCTSIVKHDPTWESNGGVFIVTGAQLVIKGKWPSKVLHLRLLYTHIPNCSIRKTDWASSPEASHKSSFLTNLSSTFTFTQRAVADAPKQLPATLNSGVYPDGPPVPIRSTKLLKYVDPTEVARGPYDTPGHWLVTAAKLVPEGGKIGLHVKFALLDYSQEA

SEQ ID NO: 363 - protein, 593 aa, Campyloneurum angustifolium
MAGTKDAAALAAVEALGCGFDLTSDYRLKYKKGRLLQLQHSHNKDLTIPGGITIPDVSRDIKCDKGERMRFASEVMQFQQMSQWFNQNASIEGKIPLGLFNAMFDLSGSWQDDANRLKNLAFDGCFITLYKLHLTRSNLVLREEVKNDIPSVWDPKSLAKFIEKYGTHIIVSASVGGQDVLYLKENYSSLLSAQDIHKKLKSAGDEYFYENSGKRNADFKDNETSPLNSQPFRGTIAASAQLLISNKDYTVISQRRGGYYFAKTHHEWQETVNIYPEAISLSFVPITSLLLGAAGSGFLQHAVNLYLRYKPPVSDLYYFLDFQVPRQWIPVHNELPLRLARKQTFAPSLQFSLMSPKLYINNTEVVVNRKPVTGIRLYLEGRKNNRLGIHLQHLSVLPQSLGQFWSEGTQIEPPQWNGSNDAPNDWFEPVEWRCFSHVCTQPIKIKPEWLNEGGSAFIVTGARLDVKAHGLKSVLHLHLLFSKIPGCTIQRSRWDQHQAAEKTGFFSSISTTFSTTTKAGKKSPQVVVDSAVFMGGPPRPIQSPKLLKFVDTAELTKGPQDAPGHWVVTAARLELDRGKISIKVKFSLLNYAE

SEQ ID NO: 364 - protein, 380 aa, Asplenium prolongatum x Asplenium antiquum (Kurata)
MNAVNGSKDGLSLSWMNDSLSDLLTVETADVKVMFKRKGGKDVSQSHEEWLHTVPAAPDIVSMSFVPITSLLNGVMGTGFLSHAINHFLRYKPSIAELRHFLEFQLPKEWAPAFGDLPLGPPRKQQASPSLQFRLMGPKLQVNTMPVVVGKRCVTGIRLHLEGKKSNRLAIHLQYLTAVPQILQGLWEDYQPEKWEGPDTDFSRYFEPVLWRSFSHVCTAPVESKEPWVDEMRGEPVLKGALVVTGAQLDVEQHGSKKVLFLRLLYSKIRKVRIRRSEWDHMPASQQRSGIFSTLISTHFSSAPSSPSKPVQVNSAIYPDGPPPANSQAPKLLKFVDTSAMTRGPLDLPGHWLVTGAKLDVERGKIAVRAKYSLLLYGAD

SEQ ID NO: 365 - protein, 599 aa, Bignonia chamberlaynii (Bureau)
MALRLPAGEAAKVAIHSIGHGYDISLDLRLKYCKGDSCLIEVDEDQGREIVLPGGISIQNVSKSIKCDKGERTRFRSDVLTFQQMSEQFNQELSLTGKIPSGLFNSMFEFSGCWQKDAAYTKALAFDGMFITLYTVALEKSQMVLKDHVKKEVPSSWEPAALARFINKFGTHVIVGVKMGGKDVIYVKQQHSSSLQPADVQKRLKVMADKRYLDANGQHELDSEQIYQNQKFDMKETRLRFADTGTSSSYSHKDEIISICKRRGGSDVTNLTHNEWLQTVLLEPDVISMSFIPITSLLNGVSGSGYLSHAINLYLRYKPPIEELHQFLEFQLPRQWAPVFSDLPLGPQRRQQNTASLQFSLMGPKLFVNTTAVDVGKRPVTGLRLYLEGKRSNRLAIHLQHLSSLPNIFQLKDDPNGNFCQESYDRRYYEKVQWKNFSHVCTAPVESDEELSIVTGAQLQVGDYGFKKILFLRLRFSTVIGAVSVKYPEWDGSPGLARKSGLISTLISHHFTAVQKPPPQPADVNINSAVYPGGPPVPTQTPKLLKFVDTTEMTRGPQEPPGYWIVSGARLVVEKGRISLRVKYSLLTVIQPDDDDVLD

SEQ ID NO: 366 - protein, 339 aa, Waldsteinia ternata
MALPAYRMDPQAAAEKAVAAIGSGYDLCLDLRLTSCKSGLVDLDPTRTRDLVLPGGAVVSDVSTSIKCDKGERTKFRSDVVSFNQMSEQYNKELSLSGKIPSGLFNAMFNYSGCWQKDAAPTKYLAFDGWLITLYSIELARSQLRLSEQVKRDVPSLWDPAALAAFIEKYGTHIIVGVKMGGKDIVHIKQLQNSKLEPAELQRRLKQVAEERFSDDANETSASNPTADLFGMMKDDNPLHWDIQRTLASSIKPPIVTHSMDDDVVTISVRRGGVDIGQSHNQWLSTISQAPNVISMSFVPITSLLGGTQGNGFLIHAVNLYLRCECLFFFSSISTWYVY

SEQ ID NO: 367 - protein, 611 aa, Adiantum raddianum (Pacific Maid)
MASKHETAKAAKVARLAINTLGRGYDLTCDLRFTSCKDADGTPLIEINDEETHELTLPGGIVVGNVPTAVKTDKGERTRFRSDILTFDQMSQQFNQGLSLSGKIPCGLFNNMFSFTGLWQKDASTTKHLALDGWFYTLYTLEIPRSQLMLKEEIKALVPSSWEPAALARFIETFGTHIIVGVKIGGKDVIYMKQHQSSPSTSVEFQKLLAEVSDERFSQSEGRASVGSVDNRSQKKHSVEFQSWSAHLDTFSHIVHNDKHHVTIIPRRKGGIDHGHSHSEWIQTVPLAPDIISVSLVPITFLLSGVAGSGFLSHAANLYLRYKPPIEELRQFLEFQLPREWAPVFSDLPLTLSRKERSPSTLQFTLMGPKLKVSKMQVAVGKKPVTGMRLYLEGKKCDKIAIHLQHLSAIPRFLQPLWEEHPFAGEATWQDPDDDSTKYFEPVQWKNFSHVCTAPVENTETWIGDHAGASVVVGAQLAVQSFGLKNVLKLRLLYSRIPEARIRRSEWDHMPSATQKSGMFSTFFSTTFSSAAASAPAKASPVVLNSGIYPEGPPKPVHDPKLMKFVDTTEMTKGPQDMPGHWLVTGAKLYLDRKRISMRVKYSLLTIGSLD

SEQ ID NO: 368 - protein, 640 aa, Lygodium japonicum
MKPAAATIRPNFFTSSSSSAPSDPASVAKQAVDALGRGYDVTGDLWLSKCREPLIVDLAESSPTQDLAIPGGISLPCVPAPIKCDKGDRTRFASDILSFSEMSEQFNKTLSIAGKIPLGLFNSMFGFTGLWQKDASSTKTLGLDGVFINLYSVEVPRTHLTLREEVRKAVPSSWDPAALASFVEKYGTHVIVGVKIGGKDVVYIKQRHSSTLSGVSIQKILETKALERFSSGETCTSKEKLTKGKDFQTKGIHGAEPNGQNGNLLRGHVDGIENSESFSLMEDSSTFSVDGDVTVIYKRKGGRESCQSHNDWLHTVPLAPDVVSMSFVPITTLLNGVPGTGFLSHAINLYLRYKPPLQELSNFLEFQLPKEWAPAFGDLPLGPPRKQQEVPSLQFRLMGPKLHINTTPVVVGKRPVTGLRLYLEGKKSNRLAIHLQYLTAVPQILKTLWVEDGGGEEEWVGPEEDFSKYLEPVQWRNFSHVCTAPVENSETWLGGPGGALVVVGARLQVQQYGAKKVLFLHLLYSRIAKARIRRSEWDHMPASQQKSGLFSTLISTTFSSAAAQSPAPPKPVVINSAIYPEGPPVPGQMPKLLKFVDTTEMTRGPHDLPGHWLVTGAKLLLERGKISLRAKYSLLLYSVE

SEQ ID NO: 369 - protein, 610 aa, Asplenium nidus var plicatum
MASKHDIPNAARVANLAFQSLGRGFDLTCDLRFSSCKDVHGAPLIELSDKDLRKVSLPGGVVVPNVPTIVKCDKGEQTHFRSDILTFDQMSQEFNHGLSLSGKVPSGLFNHMFNFTGSWQKDASATRHLALDGWFYTLYTLEMPRSQLALKEDIKAAIPTSWEPAALARFIETFGTHIIIGAKIGGKDVVYLKQHQVSTSTLADFQKLLAEVSEERFSETEGRASVGSKDSHSNNKRSMQFKSWTARLDTFSQIIYNDKHHVTIIPRRKGGFDHGQSHSDWVHTVPLAPDVISVSLVPITSLLNGVPGSGFLSHAVNLYLRYKPPTEELRQFLEFQLPREWAPVFSELPLTLSRREQSPSTLQFTLMGPKLKVNKLQVTIGRRPVTGMRLFLEGKRCDRLSIHLQHLSAMPRFLTSFWEDHPFAREATWQDPDDYSTKYFEPLQWKNFSHICTAPVENTETWIGDHAGASVVVGAQLAVKSYKLRNVLYLRLLYSKIPEAKIRRSEWDHVPASAQKSGMFSSFFSTTFSSTVVPGAARAPAVVINSGVYPEGPPKPVQDPKLLKFVDTTEMTKGPQDMPGHWLVTGAKLYLDRRKISLRVKYSLLTVSLD

SEQ ID NO: 370 - protein, 539 aa, Lygodium flexuosum
MSEQFNKTLSIAGKIPLGLFNSMFGFTGLWQKDASSTKTLALDGVFINLYSVEVPRTHLTLREEVRKAVPSSWDPAALASFVDKYGTHVIVGVKIGGKDVIYVKQRHSSPLSAVSIQKILETKAVERFSSGETCTSKEKLTKGKDFQTKGIHGAEPNGQNGNLLRGHVDGMENSESFSLMEDSSTFSIDGDVTVIYKRKGGSESCQSHNDWLHTVPLAPDVVSMSFVPITTLLNGVPGTGFLSHAINLYLRYKPPLQELSNFLEFQLPKEWAPAFGDLPLGPPRKQQEVPSLQFRLMGPKLHINTTPVVVGKRPVTGLRLYLEGKKSNKLAIHLQYLTAVPQILKTLWVEDGGGEEEWVGPEADFSKYLEPVQWRNFSHVCTAPVENSETWLGGPGGALVVVGARLQVQQYGAKKVLFLHLLYSRIAKARIRRSEWDHMPASQQKSGLFSTLISTTFSSAAAQSPAPPKPVVINSAIYPEGPPVPGQMPKLLKFVDTTEMTRGPHDLPGHWLVTGAKLLLERGKISLRAKYSLLLYSVE

SEQ ID NO: 371 - protein, 597 aa, Asplenium nidus var plicatum
MASGKDAVVLAAVESLGCGFDLTSDYRLKYKKSPLLHLQHSNKKDLTIPGGITIPDVSRDIKCDKGERIRFTSEVMQFQQMSQWFNQNSSVEGKIPLGLFNAMFDLSGSWQDDASQIKNLAFDGFFITLYKLHLARSNLVLCEEVKNDIPSVWDPKSLAKFIEKYGTHIIVSASVGGQDVLYLKENYSSPLSAQDVHKNLKSVGDDYFADRAQRSTNYKDSETLPLNALNSQTFRPTVAHINSAQVLHSCKDFTIISQRRGGYLFAKTHCGWQETVNMFPDAISLSFVPITSLLLGVAGSGFLQHAINLYLRYKPPVSDIQYFLDFQVPRQWIPVHNELPLRLTGRQPFSPSLQFSFMSPKLYVNNNEVVVDRKPLTGIRLYLEGRKSNRLAIHLQHLSVLPQSLGQLWSDSTKSEAHLWNSSADAPREWHEPVMWKCFSHVCTQPIKYKREWSAGHESVFIVTGARLEVKAHGLKSVLHLHLLFSRISGCTIQRSRWHQHQTAEKAGFFSTLSTTFSSTAKTGKKGPPAVVDSAVYIGGPPRPIESPKLLKYVDTAELTKGPQDAPGHWVVTAARLDLEGGKIMLSVKFSLLNYTE

SEQ ID NO: 372 - protein, 597 aa, Asplenium prolongatum x Asplenium antiquum (Kurata)
MASGKDAVVLAAVESLGCGFDLTSDYRLKYKKGPLLHLQHSNKKDLTISGGITIPDVSRDIKCDKGERIRFTSEVMQFQQMSQLFNQNSSVEGKIPLGLFNAMFDLSGSWQDDASQIKNLAFDGFFITLYKLHLARSNLVLREEVKNDIPSVWDPESLAKFIEKYGTHIIVSASVGGQDVLYLKENYSSPLSAQDVHKNLKSVGDDYFSDRAQKSTNFKDSETLPLNGLNSQTFRPTVAHIHSAQVLHSCKDFTIISQRRGGYLFAKTHCGWQETVNMFPDAISLSFVPITSLLLGVAGSGFLQHAINLYLRYKPPVSDIQYFLDFQVPRQWIPVHNELPLRLTGRQSFWPSLQFSFMSPKLYVNNNEVVVDRKPVTGIRLYLEGRKSNRLAIHLQHLSVLPQSLGQLWSDGTKLESHLWNGSADAPREWHEPVMWKCFSHVCTQPIKYKREWSTDHDSVFIVTGARLEVKAHGLKSVLHLHLLFSKISGCTIQRSRWYQNQTAEKTGFFSTLSTTFSSTAKAGKKGPPAVVDSAVYIGGPPRPIESPKLLKYVDTAELTKGPQDAPGHWVVTAARLDLEGGKIMLRVKFSLLNYAE

SEQ ID NO: 373 - protein, 640 aa, Asplenium australasicum
MASAVGRFAATQAQSSEAAQPQITSSPAFSIAQQAVDALGRGYNVNLDLSLSYCKQGKRLIEIDESGPTQDLLLPGNIIIPNMPASIKCDKGDRTRFTTEVLKFNEMSEQFNQNLSISGKIPTGHFNTMFNFSGSWQKDASQVKTLALDGFFINLYTVELPRAQLTLKEEVRAAVPSSWDPAALASFVEKYGTHVIVGVKIGGKDVICLRQHHSSQLSAVGVQKILEAKAKERFTSIAGGTSRENNKGKIRDGFTYGSNAMIAVNGSKDGVHPSWLNSSLSDLPPVETDDVKVMFKRKGGKAVSQSHEEWLHTVPSSPDIVSMSFVPITSLLNGVTGTGFLSHAINHYLRYKPPIDQLRHFLEFQLPKDWAPAFGDLPLGPPRKQQASPSLQFRLMGPKLQVNTMPVVVGKRCVTGIRLHLEGKKSNRLAIHLQYLTAVPQILQGLWEDHRPDNWEGPDTDFSRYFEPVMWRSFSHVCTAPVESKEPWVDEMKGEPVLKGALVVTGAQLDVQQHGSKKVLFLRLLYSKIRKVRIRRSEWDHTPASQQRSGIFSTLISTHFSSAPSPLSKPVQVNSAIYPDGPPLANSQAPKLLKFVDTSAMTRGPLDLPGHWLVTGAKLCVERGKIAVRAKYSLLLYSED

SEQ ID NO: 374 - protein, 600 aa, Asplenium antiquum (Crissie)
MASAVAGLAAMQAQSSEAAQPPKMSSTAFSIAQQAVDALGRGYNVNFDLSLSYCKQGKRLIDIDESGPTQDLLLPGNIIIPNMPASIKCDKGDRTRFTTEVLKFNEMSEQFNQNLSILGKIPTGHFNTMFDFSGSWQKDASQVKTLAMDGFFINLYTVELPRAQLSLKEEVRAAVPSSWDPAALASFVKKYGTHVIVGVKIGGKDMVCLKQQRTSQLSTVRVQKILEEKAKERFTSIAGGTSKENNKGKDVRVMFKRKGGKAVSQSHEEWLHTVPAAPDIVSMSFVPITSLLNGVMGTGFLSHAINHFLRYKPSIAELHHFLEFQLPKEWAPAFGDLPLGPPRKQQASPSLQFRLMGPKLQVNTMPVVVGKSCVTGIRLHLEGKKSNRLAIHLQYLTAVPQILQGLWEDYQPESWEGPDTDFSKYFEPVMWRSFSHVCTAPVESKEPWVDEMKGEPALKGALVVTGAQLDVEQHGSKKVLFLRLLYSKIHKVRIRRSEWDHTPASQQRSGIFSTLISTHFSSAPSSPSKPVQVNSAIYPDGPPLANSQAPKLLKFVDTSAMTRGPLDLPGHWLVTGAKLDVERGKIAVRAKYSLLLYGAD

SEQ ID NO: 375 - protein, 477 aa, Tupidanthus calyptratus
MAFNANRFDPQSAAEKAVSAIGSGYDLTVDIRLSECKPGPSGSGLIELDRTLTKDLNLPCGRVVRNVSPSIKCGKGEQTRFHSDVLTFVQMSEQFNQDISLSGKIPSGLFNAMFDFKGCWQKDAATTKSLAFDGWFFSMYNIELARSQITLSEQVKKEVPSSWDPAALAEFIEKYGTHIVVGVKMGGKDVIHLKQLQNSNLQPTEVQKLLKQLADERFSEDVNGSLIPNPEKSSGKQKEEPSIVQDLNLPFANLLRQAVVSQSKNDDLLSIRIRRGGFDTGQSHKQWLSTVSQFPNAISMSFVPLASLLSGIRGSGFLSHAINLYLRYKPPMEELEQFLEFQVPRQWAPVYGDLPLAPRRKKQASPSLKFTFMGPRLYVNTIRVDSENRPVTGIRLYLEGKKSDHLAIHLQHLSTLPKILQLSEDLSYEPIDEPAEKGYLEAVKWSIFSHVCTQPVQYNGARIDDSASIVTKAWFEV

SEQ ID NO: 376 - protein, 615 aa, Symphoricarpos x chenaultii (Hancock)
MFEEAMEERGGKPIEIRAMEALGLGFDLASDFRLKFAKGGGRERMVVLDEANRRDILLPGGTAIRGVSQDIRCDKGDQIRFKSDVLEFNQMSELLNQKSSVQGKIPSGFFNAIFDLSGAWLSDAADAKYLAFDGYFISLYYLHLTASPLVLQDHVKKSVPSHWNPASLSRFIQTYGTHIIVGMGVGGQDLLCIKQRPSSAIPPADLRGYLEDLGDCLFSDGRSPSLLERKTRDGKQKVPEVFNRILQSHTMQFTSITETSSKDGLTLIWSKRGGDVFSHSHSKWLQTVSANPEAILFKFVPITSLLTGVPGSGYLSHAINLYLRYKPAAEDLQYFLEFQVPRQWAPLFCELPLRHQRRKPSCPLLQFSFMGPKIHVNSSQVSTGEKPVIGLRLYLEGKKCNRLAIHVQHLSSLPSMMTFESDKHLTISSQWRGSDSYDSHSQFLEPIKWKRYSNICSSVVKHDPSWLTAQSNGVFVVTGAQLISKGKWPKTVLHLRLLFSYLPNCTILKTEWASAPEASRKLGFLTNLSTTFTQRTVNDAPKQLPATLNSGVYPDGPPVAAQSVKLLKYVDTNEVVRGPHDSPGHWLVTAAKLVTEGGKIGMHVKFALLDYSQDL

SEQ ID NO: 377 - protein, 386 aa, Vernonia noveboracensis
MSFYQTNFYDPQSAAEKAVSVIGYGYDLTSDIRLTGCKPGPTGSTLIELDRTLSKDLVVPGGVVVHDVSPAIKCDKGERTRFHSDVLSFNHMSEQFNQEVSLSGKIPSGFFNSMFGYKGCWQKDAATTKNLAFDGWFITLYNIELEKAQIVLSEKVKQQVPSLWDPTALAEFIDKYGTHIVVGVKMGGKDVIYLKQLHSSNLEPTEVQNLLKQLADDEWSEDVSASSVSGPDKLIKQKDARSVAWDIPVLGNSIRQPIVISRSKKDDLLSIHVRQGGIDHGQSHKSWLSTVSQSPNVISMSFVPIVALLGGVRGSGFLSHAINLYLRYKPPIEELEQFLEFQLPRQWAPAYGDLPLAPRRKKTPSPSLQFTFLGPRLYVNTIKVKS

SEQ ID NO: 378 - protein, 580 aa, Asplenium australasicum
MASGKDAVVLAAVESLGCGFDLTSDYRLKYKKGPLLHLQHSNKKDLTIPGGITIPDVSRDIKCDKGERIRFTSEVMQFQQMSQWFNQNSSVEGKIPLGLFNAMFDLSGSWQDDASQIKNLAFDGFFITLYKLHLARSNLVLREEVKNDIPSVWDPKSLAKFIEKYGTHIIVSASVGGQDVLYLKENYSSPLSAQDVHKNLKSVGDDYFADRAQRSTNYKDSETLPLNALNSQTFRPTVAHINSAQVLHSCKDFTIISQRRGGYLFAKTHCGWQETVNMFPDAISLSFVPITSLLLGVAGSGFLQHAINLYLRYKPPVSDIQYFLDFQVPRQWIPVHNELPLRLTGRQPFSPSLQFSFMSPKLYVNNNEVVVDRKPLTGIRLYLEGRKSNRLAIHLQHLSVLPQSLGQLWSDSTKSEAHLWNSSADAPREWHEPVMWKCFSHVCTQPIKYKREWSTDHESVFIVTGARLEVKAHGLKSVLHLHLLFSKISGCTIQRSRWHQHQTAEKAGFFSTLSTTFSSTAKAGKKGPPAVVDSAVYIGGPPRPIESPKLLKYVDTAELTKGPQDAPGHWVVTAARLDLL

SEQ ID NO: 379 - protein, 641 aa, Asplenium prolongatum x Asplenium antiquum (Kurata)
MASADGRFAATQAQSSEAAQPQITSSTAFSIAQQAVDALGRGYDVNFDLRFGYCKQRKHLIENDELGPTQDLLLPGNIIIPNMPASIKCDKGERTRFTTEVLTFNEMSEQFNQDLSISGKIPTGHFNNMFDFSGSWQKDASQVKTLALDGFFINLYTVELPRAQLTLKEEVRAAVPSSWDPVALASFVEKYGTHVIVGVKIGGKDVICLRQHHSSQLSAVGVQKILEAKAKERFTYIVGGTSKEKINKGKIRDGFSYGSDVMNAVNGSKDGLSLSWMNDSLSDLLTVETADVKVMFKRKGGKDVSQSHEEWLHTVPAAPDIVSMSFVPITSLLNGVTGTGFLSHAINHYLRYKPPIDQFRHFLEFQLPKDWAPAFGDLPLGPPRKQQASPSLQFRLMGPKLQVNTTPVMVGKRCVTGVRLHLEGKKSNRLAIHLQYLTVVPQILQSRWEDDQLENWEGPDTDFSKYFEPVLWRSFSHVCTAPVESKEPWVDEMRGEPVLKGALVVTGAQLDVEQHGSKKVLFLRLLYSKIHKAASRRSEWEHTPASSQRSGIFSTLISTPFSSAASSPSKPVHVNSAIYPDGPPPANSQGPKLLKFVDTSEMTRGPLDLPGHWLVTGAKLSVERGKIAVRTKYSLLLYSED

SEQ ID NO: 380 - protein, 618 aa, Tupidanthus calyptratus
MEGGEETVKPIGLRAMESLGLGFDFASDFRLKFAKRCPGAGGDDRLVVLDEASRRDVVFPGGGVIRGVPECIRCDKGDRIRFKSDVLKFNQMSELVNQKSSVQGKVPSGYFNAMFDLSGSWLNDAADANHLAFDGYFISLYYLHLIASPLVLRDKVKNSVPSHWNPASLSRFILTYGTHIIVGLAVGGQDVICVKQRPSSGIPPAELRGYLEDLGDCMFSDGRNPVLERKTRDGKQKVPEVFNRMLQSHTMQFSSITETSSKDGLTILSSKRGGDVFSQNHSNWLQTVASNPEAICFKLVPITSLLTGVPGSGYLSHAINLYLRYKPAPEDLRYFLEFQVPVQWAPLFCELPLRHQRRKASCPLLQFAFLGPKIHVSSTQVTSGEKPVVGLRLFLEGKKCNRMAIHAQHLSSLPNIMEFALSNSATSRPCQWRGSDDYISNDQFLEPVRWKRYSNVCSSVVEHDSNWIQGEEVGAFVVTGAQLISKGKWPKTILHLRLLFSYLPNCTIRKTEWAAAPEASQKSGFRLNLSTTFTFSQRTGADAPKQLPAALNSGVYPEGPPVPLRSKKLLKYVDVAEVVRGPHDTPGHWLVTAAKLVTDGGKIGLHVKFALLDYLPGS

SEQ ID NO: 381 - protein, 639 aa, Asplenium nidus var plicatum
MASTVGGLAAMQAQSSEAAQPPNMSSTALSIAQQAVDALGRGYNVNSDLSLSYCKQGKRLIEIDESVPTQDLLLPGNIIIPNMPASIKCDKGDRTRFTTEVLTFNEMSEQFNQNLSISGKIPTGHFNTMFNFSGSWQKDASQVKTLAMDGFFINLYTVELSRTQLSLKEEVRAAVPSSWDPAALASFVKKYGTHVIVGVKIGGKDVVCLKQHHTSQLSTIRVQKILEEKAKERFTSIAGGTSKEKINKGKIRDGSPYGSNAMNGSKDGLSLSWMNDSLSDLLTVETDDVRVMFKRKGGKDFSQSHEEWLHTVPAAPDIVSMSFVPITSLLSGVIGTGFLSHAINHFLRYKPAIAELHHFLEFQLPKEWAPAFGDLPLGPPRKQQASPSLQFRLMGPKLQVNTMPVVVGKRCVTGIRLHLEGKKSNRLAIHLQYLTAVPQILQGLWEDHRPDNWEGPDTDFSRYFEPVMWRSFSHVCTAPVESKEPWVDEMKGEPVLKGVLVVTGAQLDVQQHGSKKVLFLRLLYSKIRKVRIRRSEWDHTPASQQRSGIFSTLISTTFSSAPSPPSNKPVQVNSAIYPDGPPLANGQAPKLLKFVDTSAMTRGPLDLPGHWLVTGAKLDVERGKIAVRAKYSLLLYGTD

SEQ ID NO: 382 - protein, 408 aa, Tupidanthus calyptratus
MYPNKLIVIKVSGYDLAHGLSFQQMSEQFNQEVSLSSKIPTGHFNAAFQFTGCWQKDAANTKTLALDGVFITIYTIALEKSQITLCDHIKEAVPSSWDPAALARFIEKFGTHVIVGVKMGGKDIVYMKQQHSSPLQSDEVQKRLKHVADNRFSNASGHSTNPEKVYEREMLEINEPPQEFMDDSASSSYMDLEDITFFYRRRGGSNKKNLPHDKWCQSVQLEPDVISMSFIPISSLLSGINGNGFLTHAINLYLRYKPAIEELSQFLEFQHPRQWAPVFGELAVGPERKQQSGASLQFSFLGPKLYVNTTLVDAGKRPVTGLRLYLEGTKSNCLAIHLQHLSTLPKSFQLQDEATCNYGSNDQRYYEKVQSKSFSHVCTGPVESDEDHSIVTGAQFEVRNSETTSTAI

SEQ ID NO: 383 - protein, 339 aa, Symphoricarpos x chenaultii (Hancock)
MAFNAANRFDPQSAAEKAVSVIGYGYDLTADIRLSACKAGPSGSRLIEIDQSATKDLVVPGGIVVPNVSASIKCDKGERTRFRSDVLSFNQMSEQFNQELSLSGKIPSGLFNAMFGFKGYWQKDAATTKTLAFDGWFISLYNIELARAQISLSESLKKEVPSSWDPAGLAEFIEKYGTHIIVGVKMGGKDVIHLKKLQDSNLESTEVQKLLKQLADERYAEDVSGSLDSNPDKSSGKLKDGQSVVWDLQLPFASSLRPSIVSHSKNESMLSIHIRRGGIDNCQSHNQWLSTVSRSPNVISMSFVPIASLLSGVRGSGFLSHAINLYLRCEYAYLYILPL

SEQ ID NO: 384 - protein, 614 aa, Symphoricarpos x chenaultii (Hancock)
MAFNAANRFDPQSAAEKAVSVIGYGYDLTADIRLSACKAGPSGSRLIEIDQSATKDLVVPGGIVVPNVSASIKCDKGERTRFRSDVLSFNQMSEQFNQELSLSGKIPSGLFNAMFGFKGYWQKDAATTKTLAFDGWFISLYNIELARAQISLSESLKKEVPSSWDPAGLAEFIEKYGTHIIVGVKMGGKDVIHLKKLQDSNLESTEVQKLLKQLADERYAEDVSGSLDSNPDKSSGKLKDGQSVVWDLQLPFASSLRPSIVSHSKNESMLSIHIRRGGIDNCQSHNQWLSTVSRSPNVISMSFVPIASLLSGVRGSGFLSHAINLYLRYKPPIEELQQFLEFQLPRQWAPAYGDLPLASRRKKQPSPALQFTFMGPKLYVNTVKVDSGNRPVTGVRLYLEGKKSDHLAIHLQHLSTLPEILQLSDDLSYEPIDEPVERGYFEPVKWSIFSHICTAPVQYNGARIDESASIVTKAWFEVKAVGMKKVLFLRLGFSMVASARIRRSEWDGPTSSSRKSGLISMLISTPFSTGLNQQQKKPEKVDLNSAVYPGGPPLPTRAPKMSHFVDTKEMVRGPEDPPGYWVVTGAKLCVEGGRIRIKVKYSLLTIISDDSLFM

SEQ ID NO: 385 - protein, 619 aa, Verbascum chaixii (Vill)
MAYYGHSNARLDAKAAAEKAVSVIGFGYDLTSDIRLSACKPGPSGSGLIELERSRTKDLVVPGNVVVSNVSGSIKCDKGERTRFSSDALTFNQMSEHFNQELSLSGKIPSGLFNTMFGFKGCWQNDASTSKILAFDGWLISLYTIELERSQITLSDKVKQEVPSTWDPPALAEFIEKYGTHVIVGVKMGGKDAIHIKQLKNSNLQPTEVQKLLKQLADEQFSEDGNEDPTADSDISSGKSKVQQSLIWDLQIPFTSTVRPPVVSHSKTDDLLSIHIRRGGLDSGQSHKKWLSTVSQYPNVISMSFVPIASLLSGTRGSGFLSHAINLYVRYKPPLEELTQFLEYQLPRQWAPAYNDLPLGHCRRKKASPSLQFSLLGPKLYVNTVKVDTGNRPVTGLRLYLEGKKSDHLAIHLQHLSTLPQSLQLSPDHTYDPGDDSIDRGYFEPVKWSIFSHICTAPVEYHGARIDDSASIVTKAWFEVKGVGMKKVLFLRLGFSMVASAIIRRSEWDGPTSTSKKSGLISMLMSTPFSTALNNNNNQTDKLNKINLNSAVYPGGPPSPAKAPKMSHFVDMKEMVRGPEEPPGYWVVTGAKLCVEMGMVRIKVKYSLLTIFSDDSLFM

SEQ ID NO: 386 - protein, 640 aa, Asplenium australasicum
MASAVGRFAATQAQSSEAAQPQITSSPAFSIAQQAVDALGRGYDVNFDLRLGYCKQRKHLIENDELGPTQDLLLPGNISIPNLPASIKCDKGDRTRFTTEILTFNEMSEQFNQDLSISGKIPTGHFNNMFDFSGSWQKDASQVKTLALDGFFINLYTVELPRAQLTLKEEVRAAVPSSWDPAALASFVEKYGTHVIVGVKIGGKDVICLRQHHSSQLSAVGVQKILEAKAKERFTSIAGGTSRENNKGKIRDGFTYGSNAMIAVNGSKDGVHPSWLNSSLSDLPPVETDDVKVMFKRKGGKAVSQSHEEWLHTVPSSPDIVSMSFVPITSLLNGVTGTGFLSHAINHYLRYKPPIDQLRHFLEFQLPKDWAPAFGDLPLGPPRKQQASPSLQFRLMGPKLQVNTMPVVVGKRCVTGIRLHLEGKKSNRLAIHLQYLTAVPQILQGLWEDHRPDNWEGPDTDFSRYFEPVMWRSFSHVCTAPVESKEPWVDEMKGEPVLKGALVVTGAQLDVQQHGSKKVLFLRLLYSKIRKVRIRRSEWDHTPASQQRSGIFSTLISTHFSSAPSPLSKPVQVNSAIYPDGPPLANSQAPKLLKFVDTSEMTRGPLDLPGHWLVTGAKLCVERGKIAVRAKYSLLLYSED

SEQ ID NO: 387 - protein, 636 aa, Platycerium wandae
MASAAGGFAALQPQSSEAAPPQSSPFSVAQLAIDALGRGYDVNSDLWLRNCPHNERLIEDNPGPTQDLLLPGNIVISNVSSSIKCDKGDRTRFTSDVLTFNEMSEQFNQNLALSGKIPVGHFNAMFGFSGSWQRDASAVKNLAMDGVFITLYSVELPRSQLTLKEEVKAAVPSSWDPAALASFLEKYGTHVIVGVKVGGKDVICLKQHRSSSLSAVGVQKILEAKGKERFSSVEGSTAKEKINKGKIRDGSLFGSNGLNALNGSKDLPWMSDSSTDFSTVETEDVTVIFKRKGGRDRSQSHDEWLLTVPLFPDVVSMSFVPITSLLSGITGTGFLNHAINHYLRYKPPIQELHHFLEFQLPKEWAPAFGDLPLGPPRKQAGSPSLQFRLMGPKLQVNTTPVVIGKRCVTGLRLHLEGKKSNRLAIHLQYLTVVPQILQQLWQDDQSEVWEGPDEDASKYFEPVMWKSFSHVCTAPVESTETWEDEGKGDPESKGAQVVTGAQLDVLQCGSKKVLFLKLLYSKIHKARVRRYEWDHVPASQQKSGIFSTLMSTTFSSVQASPQKPVQVVVNSAIYPQGPPAANSQAPKLLKFVDTSEMTRGPLDLPGHWLVTGAKLFVDRGKIAVRAKYSLLLYSVD

SEQ ID NO: 388 - protein, 598 aa, Verbascum chaixii (Vill)
MALKLPAAEAAKVAIHSIGCGYDISLDLRLKYCKGDSSLIEIDEDHGREIVLPGGVTIPNVPKSIKCDKGERTRFRSDVLTFQQMSEQLNQELALTGKIPSGLFNAMFEFSGCWQKDAAYTKTLSFDGMFITLYTVALEKSHMVLRDNVKKEVPSSWDPASLARFISKFGTHVIVGLKMGGKDVIYMKQQHSSSLQSADVQKRLKAMADKRFLDANGQSELNSEQLYQSGKLEMKESRLRFADTGSSSSYSHKDDIVSICKRRGGTDGRNLNHKEWLQTVQSEPDVISMSFIPITSLLNGVSGSGYLSHAINLYLRYKPPIEELHQFLEFQLPRQWAPVFSDLPLGPQRRQQSTASLQFSLLGPKLFVNTSAVDVGKRPVTGLRLYLEGRRSNRLAIHLQHLSSLPNIFQLEDDPNGNFRQESHDRRYYEKVQWKNFSHICTAPVESDEELSIVTGAQLQVGDYGFKKVLFLRLRFSTVLGAVSVKYPEWDGSPGLARKSGLISTLISHHFTAVQKPSPQPADVNINSAVYPGGPVPVQTSKLLKFVDTAEMTRGPQNSPGYWVVSGARLVVEKGRISIRVKYSLLTVVQPDDDDVSE

SEQ ID NO: 389 - protein, 520 aa, Nephrolepis exaltata (compacta)
MSQQFNQGLSLSGKIPSGLFNYMFNFTGSWQKDASTTRHLALDGWFYTLYTVEIPRSQLVLKEDIKASVPTSWEAAALARFIETFGTHIIVGAKIGGKDVVYMKQHQSSPSTSIDFQKLLAEVSDERFAQTEGRTSVGSKDGRINKKKRGIEIQSWAAHLDTFSQITYNEKHHVTIIPRRKGGFDHGQSHSDWIHTVPLAPDIISVSLIPITSLLHGVSGSGFLSHAVNLYLRYKPPIEELRQFLEFQFPREWAPVFSELPLTLSRREHSVSTLQFTLMGPKLKVSKLQVTVGKKPVTGMRLFLEGKRCDKLAIHLQHLSAIPRFLQPLWEDHPFAREVTWQDPDDCSTKYFEPVQWKNFSHVCTAPVENMETWIGDHAGACVVIGAQLAVKSFGLKNVLYLRLLYSKIPEAKIRRSEWDHMPASTQKSGMFSSFLSSTFSSAPAPAKVPAVVINSGIYSEGPPKPVRDPKLLKFVDTTEMTKGPQDMPGHWLVTGAKLYLDKGKISLRVKYSLLTVSSD

SEQ ID NO: 390 - protein, 578 aa, Matteuccia struthiopteris
MARSYVAYVITPRDPFCNTTPTGTSLFPEASQFRMFREMSNVTKESASALPLSSYSFNRCLNGSIKMLLLKERFLLGFSMLCLICLDLGKMMQTNYRISPLMYTLSLYKLHLTRSHLVLREEVKNDIPSVWDPQSLAKFIEKYGTHIIVSASVGGQDVLYLKENYSSLLSTQDIHKKLKSAGDDYFSDRGGEKSANFKESETLPLNALSSQPFRATVAHIHSAQVLVTNKDFTIISQRRGGYHFAKTHCGWQETVNIFPEAISLSFVPITSLLVGVAGSGFLQHAINLYLRYKPPVSDIQYFLDFQVPRQWIPIHNELPLRLARKQTFSPSLQFSLTGPKLYINNNEVVVNRKPVTGIRLYLEGRKSNRLAIHLQHLSVLPQSLGQFWNEGTELESPWWNGSNDAPKEWFEPVEWKCFSHVCTQPIKYKPEWLNERGSAFVVTGARLEVKAHGLKNVLHLHLLFSKIPGCTIQRSRWGQHPAAEKTGFFSSISTTFSSTTKAGKKGPPVVVDSAVFIGGPPRPIQSPKLLKFVDTTELTKGPQDAPGHWVVTAARLELDRGKISVSVKFSLLNYADAE

SEQ ID NO: 391 - protein, 429 aa, Symphoricarpos x chenaultii (Hancock)
MGGKDVIHLKKLQDSNLESTEVQKLLKQLADERYAEDVSGSLDSNPDKSSGKLKDGQSVVWDLQLPFASSLRPSIVSHSKNESMLSIHIRRGGIDNCQSHNQWLSTVSRSPNVISMSFVPIASLLSGVRGSGFLSHAINLYLRYKPPIEELQQFLEFQLPRQWAPAYGDLPLASRRKKQPSPALQFTFMGPKLYVNTVKVDSGNRPVTGVRLYLEGKKSDHLAIHLQHLSTLPEILQLSDDLSYEPIDEPVERGYFEPVKWSIFSHICTAPVQYNGARIDESASIVTKAWFEVKAVGMKKVLFLRLGFSMVASARIRRSEWDGPTSSSRKSGLISMLISTPFSTGLNQQQKKPEKVDLNSAVYPGGPPLPTRAPKMSHFVDTKEMVRGPEDPPGYWVVTGAKLCVEGGRIRIKVKYSLLTIISDDSLFM

SEQ ID NO: 392 - protein, 527 aa, Waldsteinia ternata
MFLQMSELLNQKSSVQGKIPSGYLNSIFGLSGDWLQDAAETKYLAFDGFFISLYNLHLTASPLVLRNKVQKSVPSRWDPAALSRFIHSYGTHIIVGMAVGGQDLVCVRQKSSSPVPPADLRRNLEDLGDFLFSDGPSLLRGKTRNGKQKIPEVFDRILQSNTMQLTTISETSSKDGLTVVCSKRGGDVFLNSHSNWLQTVLAEPEAIIFKFVPITSLLTGLPGSGYLSHAINLYLRYKPDLEDLQHFLEFQVPRQWAPMFCELPLSHQRKKASCPSLQFSFMGPKILVSSMQVSTSQKPVVGLRLYLEGKKCNRLAVHVQHLSSLPNTMELKLANTRTTRPSWWRGSDDSEFSGQFLEPIKWKRYSSICSSVVRYDPNWLKGDPGGVYIVTGAQLLSKGKWPKTILHLRLHYTFLPSCAIRKTEWAGSPEPSHKSTFLMNLSTTFTMTQRTVTDQQKQDPAALNSGVYPEGPPVLNRSAKLLKFVDTAEVVRGPHDAPGHWLVIAAKLVKEGNRIGLHTKFALLDYW

SEQ ID NO: 393 - protein, 387 aa, Aglaomorpha (Roberts)
MASKLDIPNAATVAHLAIQSLGRGYDLTCDLRFSSFKDVNGASLIELRDSETIELSLPGGVVVANVPAIVKCDKGERTRFRSDILAFEQMSQQFNQGLSLSGKIPCGLFNNMFNFTGSWQKNSSNTKHLALDGWFYTLYNMEMPRSQLVLKEDIKASVPSSWEPVALARFIETFGTHIVVGVKVGGKDVVYMKQHQSSPSTSIEFQKLLAEVSDERFLRSEGRASVGSKDSRSNKKHNIEFQPWSAHLDTFSQMSYNEKHHVTIIPRRKGGFDHGQSHSEWIHTVPLAPDIISVSLIPITFLLHGVAGSGFLSHASNLYLRYKPPIEELRQFLEFQLPREWAPVYSELPLTLPRREPSLSTLQFTFMGPKLKVSKLEIAFNLAQERA

SEQ ID NO: 394 - protein, 613 aa, Tupidanthus calyptratus
MEGGEETVKPIGLRAMESLGLGFDFASDFRLKFAKRCPGAGGDDRLVVLDEASRRDVVFPGGGVIRGVPECIRCDKGDRIRFKSDVLKFNQMSELVNQKSSVQGKVPSGYFNAMFDLSGSWLNDAADANHLAFDGYFITLYCLHLTASPLVLRDKVKKSVPSHWNPASLSRFIQTYGTHVIVGLAVGGRDLICVKQRQSSGIPPAELRGYLEDLGDCLFSDGKSPLLERKARDGKQNVPEVFTRMLQSNTKHFTSITETSSKDGLTIILSKRGGDVFSQSHSKWLQTVASNPEAISFKLVPITSLLTGVRGSGYLSHAINLYLRYKPIPEDLQYFLEFQVPRQWAPLFCEMPLGHQRRKASCPPLQFSFMGPKTRISSTLVTSGQKPVVGLRLFLEGKKCNHLAIHVQHLSSLPNIMAFACANSTISKPSQWRGSDDYESSDQFLEPVRWKRYSNVCSSVVKHDPNWIQGEEPGGAFIVTGAQLISKGKWPKTVLHLYLLFTYLPNCTIRKTEWAAAPETSRRSGFLTNLSTTFTFTQRDVADAPKQLPAALNSAIYPDGPPVPLSSGKLLKYVDVSEVVRGPHDTPGHWLVTAAKLVTDGGKIGLHVKFALL

SEQ ID NO: 395 - protein, 388 aa, Symphoricarpos x chenaultii (Hancock)
MAFNAANRFDPQSAAEKAVSVIGYGYDLTADIRLSACKAGPSGSRLIEIDQSATKDLVVPGGIVVPNVSASIKCDKGERTRFRSDVLSFNQMSEQFNQELSLSGKIPSGLFNAMFGFKGYWQKDAATTKTLAFDGWFISLYNIELARAQISLSESLKKEVPSSWDPAGLAEFIEKYGTHIIVGVKMGGKDVIHLKKLQDSNLESTEVQKLLKQLADERYAEDVSGSLDSNPDKSSGKLKDGQSVVWDLQLPFASSLRPSIVSHSKNESMLSIHIRRGGIDNCQSHNQWLSTVSRSPNVISMSFVPIASLLSGVRGSGFLSHAINLYLRYKPPIEELQQFLEFQLPRQWAPAYGDLPLASRRKKQPSPALQFTFMGPKLYVNTVKVNSL

SEQ ID NO: 396 - protein, 318 aa, Platycerium hillii
MILPSSIPALSWQVQKAAALAAVEALGCGFDLTSDYRLKYKKGPLLELQHSHNKDLTIPGCITIPDVSRGIKCDKGEHMRFTSEVMQFQQMSQWFNQNASVEGKIPLGLFNAMFDLSGSWQDDANRLKNLAFDGCFITLYKLHLPRSNLVLREEVKNDIPSVWDPKSLAKFIEKYGTHIIVSASVGGQDVLYLKENYSSLISAQEIRKKLKSAGDEYFSETSGKRNADFKHSETSPLNSQPFRGTIAGSAQLLISNKDYTLISQRRGGYYFAKTHCEWQETVNMYPEAISLSFIPITSLLLIGCGWKRLFAACDQSLS

SEQ ID NO: 397 - protein, 519 aa, Vernonia noveboracensis
MSEQFNQEISLTGKIPSGLFNAMFEYSGSWQKDASSTKTLAFDGVFISLYTVALEKSQMVLCDNVKKAVPSSWDPALLARFIEKFGTHIIVGVKMGGKDVIYMKQQHASSLQPADVQKRLKAMADKRFLDADGQYIIDAEHTSHNDKDDIRGQRLRFADADPSSSYSYKEDLVSIYKRRGGCDDRNLKHNEWLHGVQLEPDVITMSFIPITSLLNGVSGSGYLSHAINLYLRYKPPVEELHQFLEFQLPRQWAPVFSDLPLGPQRKQQTTPSLQFSFFGPKLYVNINPVDVGKRPVTGLRLYLEGKRSNRLAIHLQHLSSLPKVFQLEDDVDGNLAEESYDRRYYEKVQWKHFSHVCTAPVESDDELSIVTGAHLHVGDYGFKRILFLRLRFSTVVGAAAIKNPEWDGSPGLARKSGLISTLISHHFTAVLKSQPQAAEVNINSAIYPGGPPAPVQVPKLLKFVDTAEMTRGPQESPGYWVVSGGRLVVDKGKISVRVKYSLLTVVSADDEEAAAALDV

SEQ ID NO: 398 - protein, 616 aa, Stenochiaena tenuifolia
MASVDGGFVAMQAQSSKGMPKNTAFQVAQHAVDSLGRGYDVNADLWLRYCKRSERLIENDDSGPKQDLLLPGNIIIPNVPSSIKCDKGDRMRFTSDVLTFSEMSEQFNQTLSISGKIPVGHFNSMFGFSGSWQKDASQVKTLAMDGVIINLYSVELPREQLTLKEEVRAAVPSSWDPAALASFVEKYGTHVIVGIKIGGKDMICLKQHRSSSLPAVGVQKILEAKAKERFSSVESSAIKEKVNKGKDGMPLSWMNDSAPEIETDDVTVIFKRKGGRDISLSHEDWLHTVPSAPDIVSMSFIPITSLLNGVAGTGFLSHAINHYLRYKPPIQELRYFLEFQLPKEWAPAFGDLPLGPPRKQQDSPSLQFRLMGPKLQVNTTPVFIGKRCVTGLRLHLEGKKSNRLAVHLQYLTVVPQILQRLWEDDQPEEWVGPDDDFSKYFEPVMWKSFSHVCTAPVESNETWVDESRGENALKGALVVTGAQLNVEQHGSKKVLFLRLLYSKIHKATVRRSEWDHTPASQQKSGIFSTLLSTPFSSQAAPVKPVQVVVNSAIYPDGPPAAKSQAPKLLKFVDTTEMTRGPLDLPGHWLVTGAKLFVDRGKIAVRAKYSLLLYSED

SEQ ID NO: 399 - protein, 509 aa, Equisetum
MDQTRAKESIQALGCGYDVLDDLRLNRYKGDSKYRLIELDESQTQDLVIQGGITIPGVPKAITCEKGERTRFRTDVLPFQQMSEQVNQWMSIPGKIPLGLFNGMFGLSGHWQKDALSVKNLAIDGWLITFYSVELPKSQLVLREEVKKEVPSSWDPQGLASFIEKYGTHIIIGVKIGGKDVLCMKQHQSSSLSTIEIQALLKKKADERFANTEYGDDALSTEQKFDGEKNSAMNQSNQFQLYTATTVLYSSQDNATILCSRRGGNDVGQSHNQWLQTVPGSPDVVLMSFVPITSLLNGVAGSGFLSHAINLYLRHKPPIEELMHFLEFQLPRQWAPAFSDLPLGPPKKGQSTSLLRFSLIGPRLYVNTTPVSVGRRPVTGLRLYLEGRRCNRLAIHVQHVSSVPRVLQPFWEDHPFAGEPKWQGPEDPDERYSEPVFWRSFSHVCTAPVENADVWGGDSASGAHVVVGARLVVKKWGALRNVLYLDLLYSKIPQAKIRRPEWNHTPATL

SEQ ID NO: 400 - protein, 396 aa, Tupidanthus calyptratus
MEGGEETVKPIGLRAMESLGLGFDFASDFRLKFAKRCPGAGGDDRLVVLDEASRRDVVFPGGGVIRGVPECIRCDKGDRIRFKSDVLKFNQMSELVNQKSSVQGKVPSGYFNAMFDLSGSWLNDAADANHLAFDGYFISLYYLHLIASPLVLRDKVKNSVPSHWNPASLSRFILTYGTHIIVGLAVGGQDVICVKQRPSSGIPPAELRGYLEDLGDCMFSDGRNPVLERKTRDGKQKVPEVFNRMLQSHTMQFSSITETSSKDGLTILSSKRGGDVFSQNHSNWLQTVASNPEAICFKLVPITSLLTGVPGSGYLSHAINLYLRYKPAPEDLRYFLEFQVPVQWAPLFCELPLRHQRRKASCPLLQFAFLGPKIHVSSTQVIYLSTQTDMRMHRSL

SEQ ID NO: 401 - protein, 619 aa, Verbascum chaixii (Vill)
MAYYGHSNARLDAKAAAEKAVSVIGFGYDLTSDIRLSACKPGPSGSGLIELERSRTKDLVVPGNVVVSNVSGSIKCDKGERTRFSSDALTFNQMSEHFNQELSLSGKIPSGLFNTMFGFKGCWQNDASTSKILAFDGWLISLYTIELERSQITLSDKVKQEVPSTWDPPALAEFIEKYGTHVIVGVKMGGKDAIHIKQLKNSNLQPTEVQKLLKQLADEQFSEDGNEDPTADSDISSGKSKVQQSLIWDLQIPFTSTVRPPVVSHSKTDDLLSIHIRRGGLDSGQSHKKWLSTVSQYPNVISMSFVPIASLLSGTRGSGFLSHAINLYVRYKPPLEELTQFLEYQLPRQWAPAYNDLPLGHCRRKKASPSLQFSLLGPKLYVNTVKVDTGNRPVTGLRLYLEGKKSDHLAIHLQHLSTLPQSLHLSPDHNYEPCDDSIDRAYFEPVKWSIFSHICTAPVEYHGARFDDSASIVTKAWFEVKGVGIKKVLFLRLGFSNVSSAIIRRSEWAGPTSTSKKSGLISMLMSTPFSTALNNNNNQTDKLNKINLNSAVYPGGPPSPAKAPKMSHFVDMKEMVRGPEEPPGYWVVTGAKLCVEMGMIRIKVKYSLLTIVSDESLLM

SEQ ID NO: 402 - protein, 266 aa, Phormium (Lancer Terra Cotta)
MEGEGEPVEIMALKALGLGFDLTNDFRLRFAKGWYPYRRLVELDEGNTRDIVIPGNLTIRDVPVDVGCDKGDRIRFRSDVLEFNQMSELLNQKSSIQGKVPSGYFNALFDLSGAWLDDAKNTKHLAFDGYFISLYNLHLRSSPLVLRDEVKKAVPSKWEPVLLSRFIRTYGTHIIVEMAVGGQDVICVKQSHSSTISTAELKLHLEDLGDILFSDGRNLSPLHRKGREGRNKVPDIFFKILQSNNLQLASYSETSSKDVRPANLVF

SEQ ID NO: 403 - protein, 599 aa, Tupidanthus calyptratus
MGSSKEIGLKLKATAEAAIQSIGFGYDITEDLRLKYCKGSRLIVIDDDQVRDIVIPGGILVPNVSKQINCDKGERIRFSSDGLSFQQMSEQFNQEVSLSSKIPTGHFNAAFQFTGCWQKDAANTKTLALDGVFITIYTIALEKSQITLCDHIKEAVPSSWDPAALARFIEKFGTHVIVGVKMGGKDIVYMKQQHSSPLQSDEVQKRLKHVADNRFSNASGHSTNPEKVYEREMLEINEPPQEFMDDSASSSYMDLEDITFFYRRRGGSNKKNLPHDKWCQSVQLEPDVISMSFIPISSLLSGINGNGFLTHAINLYLRYKPAIEELSQFLEFQHPRQWAPVFGELAVGPERKQQSGASLQFSFLGPKLYVNTTLVDAGKRPVTGLRLYLEGTKSNCLAIHLQHLSTLPKSFQLQDEATCNYGSNDQRYYEKVQSKSFSHVCTGPVESDEDHSIVTGAQFEVRNSGMKRVLFLRLHFSKVIGSTVFKQPEWDGSPIIAQKSGIISTLISSRFSANQKQPPRPSDFNINSAIYPSGPPVPAQATKLLRFVDTSEMTRGPQDRPGYWIVSGARLLVDRGKISLCVKYSLLAVILPEDEMSLQ

SEQ ID NO: 404 - protein, 601 aa, Phormium (Lancer Terra Cotta)
MALKFPPRKAAEFAINSIGLGYDVAADIRLKYCKRETQDPCLIELDKDQLQDIVLPGGITVSNVPKSIKCDKGERTRFRSDVLSFQQMSEQFNQELSLSGKIPSGLFNYMFEFSNCWQKDAANTKSLAFDGWFITLYTVALAKSQIVLRDHVKQAVPSSWDPAALARFIEKFGTHVIVGVKMGGKDVIYVKQQHFSNLQPAEVQKILKDMADKRFLDVSGQYGMNSEEAFGKDKFDFKEQRLRFADSSSSSSYSTKEDIVRIFKRRGGNDNKDLPHPEWLNTVQYEPDVISMSFVPITSLLQGIPGSGFLSHAINLYLRYKPPTEELHQFLEFQLPRQWAPVFSDLPLGPQRKHQSTASLQFTFMGPKLYVNTSVVDVGKRPVTGLRLYLEGKRSNRLAIHLQHLSSLPRIFELHDDPSSSYSRESHDRKYYEPIQWRHFSHVCTAPIEADEDNSIVTGAQLHVGHYGLKKVLFLRLHFSTVSNVSLVRNFEWDGSPGLTHKSGLISTLISTRFTAAIQKPPPRPADVYINSAVYPGGPPVPVQTPKLLKFIDTTEMVRGPQDPPGYWVVSGAKLQLERGKISLRVKYSLLTVMLPEEEDV

SEQ ID NO: 405 - protein, 657 aa, Pteris cretica (roweri)
MHPQSSEVATSQPHSRAFLVAQQAVDALGRGYDVTCDLWLSYCKNGELLIENDESSPTQDLFLPGNIAIPRISTAVKCDKGDSSPTQDLFLPGNIAIPRVSTAVKCDKGDRTRFTTDVLTFNEMSEQFNQSLAISGKIPLGHFNGMFNLSGSWQRDASMVKTMAMDGVYINLYSVELSRTKLALKEEVKAAVPSSWDPAALASFVEKYGTHVIVGVKIGGKDVICIKQRSSSSLSAVGVQRILEAKSKERFSSIEGSMSKEKTDRGKIRDGSILGSNGINAAHKSGVPLPWIHDSSSDFSVETDEVTVTFKRKGGRDSSQSHDEWLQTVPSAPDIVSMSFVPITSLLNGITGTGFLSHAINLYLRYKPTIQELHHFLEFQLPKEWAPAYGDLPLGPPRKQQGSPSLQFRPLGPKLQVNTTPVVVGKRCVTGIRLHLEGKKGNRLAVHLQYLTVVPQILQRTWEDDQPEIWEGPDTDFLKYFEPVMWKSFSHVCTAPVESSEMWDDETKGEQGGPRAALVVTGARLDVEQHGSKKVLFLRLLYSKIHGASIRRSEWDDAPASQQKSGIFSTLMSTTFSTAQASPLKPVQVVVNSAIYQGPPPANSQAPKLLKFVDTTEMTRGPVDSPGHWLVTGAKLFVGNGKIAVRPKYSLLLYSME

SEQ ID NO: 406 - protein, 355 aa, Hedera helix (Galaxy)
MKLKQKSFKYQVLDHLIMSQTTSNAVKATELDINQIFSTSTRCRNSSTKNAQFRGKFRQDCSTQCLVSRSDIGSWAKEAANTKYLGLDGYFILLFDLHINRYPLVLSDEVRNAVPSTWDPSALARFIEKYGTHIIVGLGIGGQDVVLLRQDKSSNVEASQLKKNLDQLGDQLFTGSCTFTPKDQKQKALPVFNVFDQQSLLSDNFSSVKTKNGIHVICSKRGGDVSANTHCEWLLTVPSMPDAIQFSFIPITSLLKGVPGNGFLSHAINLYLRYKPPLADLQYFLDFQVHKIWAPVHSELTLGPATIRPTRMAALHFNLIGPKLYVNTSQVTVGRRPVTGIRLYLEGMKCNRYSQ

SEQ ID NO: 407 - protein, 571 aa, Sphaeropteris cooperi
MASARESGRAVARAAVEALGCGFDLTADYRLKYRKGPLLNLQHSRKDLLIPGGITIPNVSRDVKCDKGERTRFTSEVMKFQQMSQWFNKNAFVEGKIPLGFFNAMFDLSGSWQHDASLTKSLAFDGCFITLYKLHLTRSNLVLREEVKKDIPSTWDPEGLARFIEKYGTHIIVAVNIGGQDVLYLKESHSSLLSTQDIHKHLKIAGDKCFSDGSGERSIDFKENEDVTIISQRRGGIVSSKTHSKWQETVDSSPDAISFSFVPITSLISGVSGSGFVQHAINIYLRYKPPVENIRYFLDFQVPRQWIPVYNELPLGLSRKQALSQSLQFSLMGPKLHVNTLQVVVIKKPVTGVRLYLEGRKSNRLAIHLQHLSVLPQCLEQFWNENIPVEQPKWNGSNGAAKNWFEPVYWKSFSHVCTTPVKYKPEWLDDKDSVFVVTGARLEVKVHGLKSVLHLQLLFTKILGCKIQTSRWDQPPAPEKSSFFSTFSTTFSTTTKAGKKGTPVVVDSAVYPGGPPRPIQSPTLLKFVDTTESTKGPHDVPGHWIVTAARLELDRGKISLRVKYSLLNYSL

SEQ ID NO: 408 - protein, 490 aa, Tupidanthus calyptratus
MALKVSAPEAAKIAIQSIGCGYDISLDLRLKCCKGDPANPRLIEIHEDQGREIVLPGGIVIPNVSKAIKCDKGEHARFRSDVLSFQQMSEQFNQEMSLTGKIPSGVFNTMFEFTGSWQKDAANTKTLAFDGVFITLYTVALEKTQMILSDHVKQAVPSSWDPAALARFIEKFGTHIIVGVKMGGKDVIYMKQQHSSSLQPSDVQKRLKTIADKRFVDASGQYGMDSEQTHQNDKFQIREQRLRFADTSPSSSYSYKEDIVIICKRRGGSDNKNLTHNEWLHNVQLEPDVISMSFIPITSLLNGVSGSGFLSHAINLYLRYKPPVEELHQFLEFQLPRQWAPVFSDLPLGPQRRQQSTSSLQFSLMGPKLYVNTTPVDVGKRPVTGLRLYLEGKRSNRLAMHMQHLSSLPKIFQLEDDPNGNFHQESYDRRYSWQCTCSTFPLFRKSSNLKMIQMGTSAKSHMIIDTTRKFSGRTSPTSALLRSNPMKIYP

SEQ ID NO: 409 - protein, 598 aa, Polystichum polyblepharum (Roeme x Kunze)
MASGKDAAALAAVEALGCGFDLTSDYRLKYRKGPLLHLQHSCNKDLTIPGGITIPDVSRDVKCDKGERMRFASEVMQFQQMSQLFNQNASVEGKIPLGLFNAMFDLSGSWQDDANQIKNLAFDGFFITLYKLHLTRSNLVLREEVKKDIPSVWDPQSLAKFIEKYGTHIIVSASVGGQDVLYLKENYYSLLSAQDIHKKLKSAGDDYFSDSSGKRNTNFKDCETLPLNALNSQPYRATGAHTHSSQLLITTKDFTIISQRRGGFHFAKTHCEWQETVNIVPEAISLSFVPITSLLLGVAGSGFLQHAINLYLRYKPPVSDLQYFLDFQVPRQWIPIHNELPLRLARKQVFSPSLQFSLMSPKLYISNNEVVVTKKPVTGIRLYLEGRKSNRLAIHLQHLSVLPQSLGQFWSGSTQMESPRWNDSNDAPKDWFEPVEWKCFSHVCTQPIKYKPEWLNERDSAFVVTGARLDVKVHGLKSVLHLHLLFSKIPGCTIQRSRWYQHPAAEKTSFFSSISTTFSSTTKAGKKGPPVLVDSAVFIGGPPRPIQSPKLLKFVDTTELTKGPQDSPGHWVVTAARLELDRGKISLGVKFSLLNYTE

SEQ ID NO: 410 - protein, 618 aa, Tupidanthus calyptratus
MEEEGGKPIEVIAMESLGLGFDFASDFKLKFAKRCPDGAGDDGRLVVIDEANKRDVVFPGGGVIRGVPESIRCGKGDRIRFKSDVLKFNQMSELINQKSSVQGKVPSGYFNAMFDLSGSWFNDAADSNHLAFDGYFISLYYLHLIASPLVLRDKVKNSVPSHWNPASLSRFILTYGTHVIVGLAVGGRDLICVKQRQSSGIPPAELRGYLEDLGDCLFSDGKSPLLERKARDGKQNVPEVFTRMLQSNTKHFTSITETSSKDGLTIILSKRGGDVFSQNHSNWLQTVASNPEAICFKLVPITSLLTGVPGSGYLSHAINLYLRYKPIPEDLQYFLEFQVPRQWAPLFCEMPLGHTERKASCPLLQFAFLGPKIHVSSTQVTSGEKPVVGLRLFLEGKKCNHLAIHVQHLSSLPNIMAFACANSTISKPSQWRGSDDYKSSDQFLEPVRWKRYSNVCSSVVKHDPNWIQGEEPGGAFIVTGAQLISKGKWPKTVLHLYLLFTYLPNCTIRKTEWAAAPETSRRSGFLTNLSTTFTFSQHQQRRAPKQLPAALNSAIYPDGPPVPLSSGKLLKYVDVSEVVRGPHDTPGHWLVTAAKLVTDGGKIGLHVKFALLDYLPEP

SEQ ID NO: 411 - protein, 605 aa, Phormium (Lancer Terra Cotta)
MALKFPPRKAAEFAINSIGLGYDVAADIRLKYCKRETQDPCLIELDKDQLQDIVLPGGITVSNVPKSIKCDKGERTRFRSDVLSFQQMSEQFNQELSLSGKIPSGLFNYMFEFSNCWQKDAANTKSLAFDGWFITLYTVALAKSQIVLRDHVKQAVPSSWDPAALARFIEKFGTHVIVGVKMGGKDVIYVKQQHFSNLQPAEVQKILKDMADKRFLDVSGQYGMNSEEAFGKDKFDFKEQRLRFADSSSSSSYSTKEDIVRIFKRRGGNDNKDLPHPEWLNTVQYEPDVISMSFVPITSLLQGIPGSGFLSHAINLYLRYKPPTEELHQFLEFQLPRQWAPVFSDLPLGPQRKHQSTASLQFTFMGPKLYVNTSVVDVGKRPVTGLRLYLEGKRSNRLAIHLQHLSSLPRIFELHDDPSSSYSRESHDRKYYEPIQWRHFSHVCTAPIEADEDNSIVTGAQLHVGHYGLKKVLFLRLHFSTVSNVSLVRNFEWDGSPGLTHKSGLISTLISTRFTAAIQKPPPRPADVYINSAVYPGGPPVPVQTPKLLKFIDTTEMVRGPQNPPGYWVVSGAKLQLERGKISLRVKYSLLTVLLPDDDDDDDDV

SEQ ID NO: 412 - protein, 644 aa, Asplenium australasicum
MASAVGRFAATQAQSSEAAQPQITSSPAFSIAQQAVDALGRGYDVNFDLRLGYCKQRKHLIENDELGPTQDLLLPGNISIPNLPASIKCDKGDRTRFTTEILTFNEMSEQFNQDLSISGKIPTGHFNNMFDFSGSWQKDASQVKTLALDGFFINLYTVELPRAQLTLKEEVRAAVPSSWDPAALASFVEKYGTHVIVGVKIGGKDVICLRQHHSSQLSAVGVQKILEAKAKERFTSIAGGTSRENNKGKIRDGFTYGSNAMIAVNGSKDGVHPSWLNSSLSDLPPVETDDVKVMFKRKGGKAVSQSHEEWLHTVPSSPDIVSMSFVPITSLLNGVTGTGFLSHAINHYLRYKPPIDQLRHFLEFQLPKDWAPAFGDLPLGPPRKQQASPSLQFRLMGPKLQVNTTPVVVGKRCVTGIRLHLEGKKSNRLAIHLQFLTVVPQILQSRWEDDQLEDWEGPDTDFSKYFEPVMWRSFSHVCTAPVESREPWAADEMAGEAALKGALVVTGAQLDVEQHGSKKVLFLRLLYSKIHKAMNRRSEWDHTPASSQRSGIFSTLISTPFSSAAASSPAAAKPVHVNSAIYPDGPPPANSQAPKLLKFVDTSEMTRGPLDLPGHWLVTGAKLCVERGKIAVRAKYSLLLYGAD

SEQ ID NO: 413 - protein, 331 aa, Platycerium bifurcatum
MASAKEAAALAAVEALGCGFDLTSDYRLKYKKGSLLELQHSHNKDLTIPGCITIPDVSRGIKCDKGEHMRFTSEVMQFQQMSQWFNQNASVEGKIPLGLFNAMFDLSGSWQDDANRLKNLAFDGCFITLYKLHLTRSNLVLREEVKNDIPSVWDPKSLAKFIEKYGTHIIVSASVGGQDVLYLKENYSSLISAQEIRKKLKSAGDEYFSETSGKRNADFKHSETSPLNSQPFRGTIAAGDEYFSETSGKRNADFKHSETSPLNSQPFRGTIAGSAQLLISNKDYTLISQRRGGYYFAKTHCEWQRTTSHFQQGLYSDFSKARRILFCEDPL

SEQ ID NO: 414 - protein, 597 aa, Tupidanthus calyptratus
MALKLPAPEAAKIAIQSIGCGYDICLDLRLKYRKRDSTNLSLIEIHEDQEKEIVLPGGILIPNVSKAIKCDKGEHARFRSDVLSFQQMSEQFNQEMSLTGKIPSGVFNTMFEFTGSWQKDAAHTKTLAFDGLFITLYTVALDKSQMVLSDHVKKAVPSSWDPAALARFIEKFGTHIIVGVKMGGKDVIYMKQQHSSSLQPSDVQKRLKTIADKRFVDASGQYGMDSEQTHQNDKFQIREQRLRFADTSPSSSYSYKEDIVIICKRRGGSDNKNLTHNEWLHNVQLEPDVISMSFIPITSLLNGVSGSGFLSHAINLYLRYKPPVEELHQFLEFQLPRQWAPVFSDLPLGPQRRQQSTSSLQFSLMGPKLYVNTTPVDVGKRPVTGLRLYLEGKRSNRLAMHMQHLSSLPKVFQLKDDPNGNFRQESYDRRYYEKVQWKNFSHICTAPVESDEDLSIVTGAQLEVGDYGFKRVLFLRLRFSTVLGAVAVKHPEWDGSPGLARKSGLISTLISHHFTATLKPPPQPADVNINSAVYPGDPPGPAQAPKLLKFVDTTEMTRGPQDSPGYWVVSGARLMVEKGRISLRVKYSLLAAILPDE

SEQ ID NO: 415 - protein, 466 aa, Asplenium antiquum (makino)
MCPLLSNATRVNRPTSGQTFSLLIRFIETFGTHIIIGAKIGGKDVVYLKQHQVSTSTLADFQKLLAEVSEERFSQTEGRASVGSKDSHSNNKRSMQFKSWTAPLDSFSQIIYNDKHHVTIIPRRKGGFDHGQSHSDWVHTVPLAPDVISVSLVPITSLLNGVPGSGFLSHAVNLYLRYKPPTEELRQFLEFQLPREWAPVFSELPLTLCRREQSPSTLQFTLMGPKLKVNKSQVTIGRRPVTGMRLFLEGKRCDRLSIHLQHLSAMPNFLTSFWEDHPFAREATWQDPDDYSTKYFEPLQWKNFSHICTAPVENTETWIGDHAGASVVVGAQLAVKSYKLRNVLYLRLLYSKIPEAKIRRSEWDHVPALAQKSGMFSSFFSTTFSSTAVTGAAKAPAVVINSGVYPEGPPKPVQDPKLLKFVDTTEMTKGPQDMPGHWLVTGAKLYLDRRKISLRVKYSLLTVSLD

SEQ ID NO: 416 - protein, 535 aa, Tupidanthus calyptratus
MEGGEETVKPIGLRAMESLGLGFDFASDFRLKFAKRCPGAGGDDRLVVLDEASRRDVVFPGGGVIRGVPECIRCDKGDRIRFKSDVLKFNQMSELVNQKSSVQGKVPSGYFNAMFDLSGSWFNDAADSNHLAFDGYFISLYYLHLIASPLVLRDKVKNSVPSHWNPASLSRFILTYGTHIIVGLAVGGQDVICVKQRPSSGIPPAELRGYLEDLGDCMFSDGRNPVLERKTRDGKQKVPEVFNRMLQSHTMQFSSITETSSKDGLTILSSKRGGDVFSQNHSNWLQTVASNPEAICFKLVPITSLLTGVPGSGYLSHAINLYLRYKPAPEDLRYFLEFQVPVQWAPLFCELPLRHQRRKASCPLLQFAFLGPKIHVSSTQVTSGEKPVVGLRLFLEGKKCNRMAIHAQHLSSLPNIMEFALSNSATSRPCQWRGSDDYISNDQFLEPVRWKRYSNVCSSVVEHDSNWIQGEEVGAFVVTGAQLISKGKWPKTILHLRLLFSYLPNCTIRKTEWAAAPEASLVEEIFKCMLISSRA

SEQ ID NO: 417 - protein, 398 aa, Vernonia noveboracensis
MADKRFLDSDGQYVIDAEHICHNDKDNIRGQRLRFADSDPSSSYSYKEDLVSIYKRRGGSDDRNLKHNEWLHSVQLEPDVISMSFIPITSLLNGVSGSGYLSHAINLYLRYKPPVEELHQFLEFQLPRQWAPVFSDLPLGPQRKQQSSPSLQFSFFGPKLYVNINPVDVGKRPVTGLRLYLEGKRSNRLAIHLQHLSSLPKVFQLEDDVDGNLAEESYDRRYYEKVQWKNFSHVCTAPVESENELSIVTGARLHVGDYGFKKVLFLRLRFSTVVGAAAIKNPEWDGSPGLARKSGLISTLMSHHLTAVLKPQSQAAAEVNINSAIYPGGPPSPVQTPKLLKFVDTAEMTRGPQESPGYWVVSGGRLVVDKGKISVRVKYSLLTVVSADDEEAAAALDV

SEQ ID NO: 418 - protein, 595 aa, Nephrolepis cordifolia (Duffii)
MASTKEAAALAAVKALGCGFDLTSDYRLKYKKGPLLHLQHSYTKDLTIPGGITIPDVVRDVKCDKGERIRFASEIMQFQQMSQFFNQNSSIEGKIPLGLFNAMFDLSGSWQDDANRIKNLAFDGCFITLYKLHLTRSNLVLQEEVKNDIPSVWDPQRLAKFIEKYGTHIIVSASIGGQDVLYLKENSSSLLSAQDLHKKLKSAGEEYFSDKGAKGNTSFKDSETSPLNALHSHQFRALAPSAQLFISNKDYTIISQRRGGYFFAKNHCEWQETVNSYPEAISLSFVPITSLLLGIAGSGFLQHAINLYLRYKPPVSDLQYFLDFQVPRQWIPIHNELPLRLARKQVFSPSLQFSLTSPKLYVNNNEVVVNRKPVTGVRLYLEGRKSNKLAIHLQHLSVLPQSLGQFWSESTQMELPRWNGSNDAPNDWFEPVEWKCFSHVCTQPIKYKPEWLNERGGAFVVTGARLDVKAHGLKSILHLHLLFSKIPGCTIQRSRWNEHPAAEKAGFFSSISTTFSATTKTGKKGPPVVVDSAIFMEGPPRPIQSPKLLKFVDTTELTKGPQDAPGHWVITAARLELEKSKISLRAKFSLLNYTE

SEQ ID NO: 419 - protein, 540 aa, Tupidanthus calyptratus
MAFNANRFDPQSAAEKAVSAIGSGYDLTVDIRLSECKPGPSGSGLIELDRTLTKDLNLPCGRVVRNVSPSIKCGKGEQTRFHSDVLTFVQMSEQFNQDISLSGKIPSGLFNAMFDFKGCWQKDAATTKSLAFDGWFFSMYNIELARSQITLSEQVKKEVPSSWDPAALAEFIEKYGTHIVVGVKMGGKDVIHLKQLQNSNLQPTEVQKLLKQLADERFSEDVNGSLIPNPEKSSGKQKEEPSIVQDLNLPFANLLRQAVVSQSKNDDLLSIRIRRGGFDTGQSHKQWLSTVSQFPNAISMSFVPLASLLSGIRGSGFLSHAINLYLRYKPPMEELEQFLEFQVPRQWAPVYGDLPLAPRRKKQASPSLKFTFMGPRLYVNTIRVDSENRPVTGIRLYLEGKKSDHLAIHLQHLSTPPKRLQLSDDLSYEPIDEPAEKGYLEAVKWSMFSHICTQPVQYNGARIDDSASIVTKAWFEVKGIGMKKVLFLRLGFSTVASAVIRRSEWDGPTMSTRKSGLMSMLISTRFSTGLTEKPELRKPI

SEQ ID NO: 420 - protein, 291 aa, Platycerium hillii
MSEQFNQNLALSGKIPVGHFNAMFGFSGSWQKDASAVKNLAMDGVFITLYSVELPRSQLILKEEVKAAVPSSWDPAALASFLEKYGTHIIVGVKIGGKDVICLKQHRSSSLSAVGVQKILEAKGKERFSSVEGSTSKEKINKGKIRDGSSFGSNGMNALNGSKDLPWMSDSSTDYSTVETEDVTVIFKRKGGRDRSQSHDEWLHTVPLFPDVVSMSFVPITSLLNGITGTGFLNHAINHYLRYKAPIQELHHFLEFQLPKEWAPAYGDLPLGPPRKQAGSPSLQFKPLTTV

SEQ ID NO: 421 - protein, 607 aa, Phormium (Lancer Terra Cotta)
MRPTDLMTPEAAAAAAVSAVGYGYDLVGDLRLSSCKAGPSGSRLIKIDDALVHDLVLPGGVVVPNVPKEIRCDKGERTRFRSDVLGFHQMAEQFNQDLSLSGKIPSGLFNAMFDFRGCWQKDLSSTKSLAFDGWFITLYSIELAKSHIVLQDKIKQEIPSSWDPVALAEFIEKYGTHIIVGIKMGGKDAVSIKQLQESALQQTEVQNLLKNLADDAFSEDFNANILLGAAEISKRLKGIKLANQENNAAVLKSMNSSIVTHLKKDDIVSIHVRRGGINTKQSHNQWLSTISQAPNVISMSFVPITSLLTGVRGSGFLSHAVNLYLRYKPPIEELHHFLEFQLPRQWAPVFNEIPLGPQHRKRRRLPSLQFTLMGPRLHVNTDKVDSKNRPVTGIRLFLEGKRNDCLAIHLQHLSTRPNIFQLSNDSDHTSADDISLNQRDYYEPIKWALLSHICTAPVQYSGASIDDSASIVTKAWLEVKDIGMRKVLFLRLGFSNVVGMKIRRSEWDGLTNVTRKSGSISAMISSRFSTGMIPPQKPKVEINSAVFPGGPPVPIRVPKMSRFVDTTEMMRGPDDLPGYWLVTGAKLCVEGGGISLKVKYSLLIRRR

SEQ ID NO: 422 - protein, 457 aa, Tupidanthus calyptratus
MYPNKLIVIKVSGYDLALTVSLSSRFIEKFGTHVIVGVKMGGKDIVYMKQQHSSPLQSDEVQKRLKHVADNRFSNASGHSTNPEKVYEREMLEINEPPQEFMDDSASSSYMDLEDITFFYRRRGGSNKKNLPHDKWCQSVQLEPDVISMSFIPISSLLSGINGNGFLTHAINLYLRYKPAIEELSQFLEFQHPRQWAPVFGELAVGPERKQQSGASLQFSFLGPKLYVNTTLVDAGKRPVTGLRLYLEGTKSNCLAIHLQHLSTLPKSFQLQDEATCNYGSNDQRYYEKVQSKSFSHVCTGPVESDEDHSIVTGAQFEVRNSGMKRVLFLRLHFSKVIGSTVFKQPEWDGSPIIAQKSGIISTLISSRFSANQKQPPRPSDFNINSAIYPSGPPVPAQATKLLRFVDTSEMTRGPQDRPGYWIVSGARLLVDRGKISLCVKYSLLAVILPEDEMSLQ

SEQ ID NO: 423 - protein, 604 aa, Pteris cretica (roweri)
MSSMAIARETARSSALAVVESLGCGFDLTSDYRLKYRKGPLLELQHNSTKDLTIPGGITIPDVSRDIKWDKGERTRFASEVMQFQQMSQWFNQNASVEGKVPLGLFNAMFDLSGSWQDDASQIKNLAFDGCFITLYKLHLTRSNLVLREDVKNDIPSVWDPQGLARFIEKYGTHLIVSANVGGQDVLYLKENQASLLPSQDLHKQLKAAADDYFSDKVGERNQNFKDSETFPLNGLKDQSSAAVIAHLHSPQLLISNKDFTIISQRRGGHYACKTHLEWQETVNVFPEAISLSFVPITSLLLGVAGSGFLQHAINLYLRYKPPVGDIQYFLDFQVPRQWIPSHNELPLRLARKQAFSPSLQFRFIGPKLYINNNEVVVDRKPVTGLRLFLEGRMSNRLAIHLQHLSVLPQSLGQFWSENANKEPPCWNGSTEAPKEWFEPVEWKCFSHVCTQPVKYKPEWLDVKGSAFVVTGARLEVKAHGFQSILHLNLLFSKIPGCVIQRSRWDQPPASEKTGFFSSLSTTFTSTARPVKKGPAINIDSAVFVGGPPRPIQSPKLLKYIDTTELTRGPQDAPGHWVVTAAHLELDRSKISLRVKFSLLSYMD

SEQ ID NO: 424 - protein, 597 aa, Tupidanthus calyptratus
MALKVSAPEAAKIAIQSIGCGYDISLDLRLKCCKGDPANPRLIEIHEDQGREIVLPGGIVIPNVSKAIKCDKGEHARFRSDVLSFQQMSEQFNQEMSLTGKIPSGVFNTMFEFTGSWQKDAANTKTLAFDGVFITLYTVALEKTQMILSDHVKQAVPSSWDPAALARFIEKFGTHIIVGVKMGGKDVIYMKQQHSSSLQPSDVQKRLKTIADKRFVDASGQYGMDSEQTHQNDKFQIREQRLRFADTSPSSSYSYKEDIVIICKRRGGSDNKNLTHNEWLHNVQLEPDVISMSFIPITSLLNGVSGSGFLSHAINLYLRYKPPVEELHQFLEFQLPRQWAPVFSDLPLGPQRRQQSTSSLQFSLMGPKLYVNTTPVDVGKRPVTGLRLYLEGKRSNRLAMHMQHLSSLPKVFQLKDDPNGNFRQESYDHRYYEKVQWKNFSHICTAPVESDEDLSIVTGAQFGVGDYGFKRVLFLRLRFSTVRGGLAVKNPEWDGSPGLARKSGLISTLISHHFTATLKPPPQPADVNINSAVYPGDPPGPAQAPKLLKFVDTTEMTRGPQDSPGYWVVSGARLMVEKGRISLRVKYSLLAAILPDE

SEQ ID NO: 425 - protein, 668 aa, Lygodium japonicum
MFYTSSSSSAPSDPASVAKQAVDALGRGYDVTGDLWLSKCREPLIVDLAESSPTQDLAIPGGISLPCVPAPIKCDKGDRTRFASDILSFSEMSEQFNKTLSIAGKIPLGLFNSMFGFTGLWQKDASSTKTLGLDGVFINLYSVEVPRTHLTLREEVRKAVPSSWDPAALASFVEKYGTHVIVGVKIGGKDVVYIKQRHSSTLSGVSIQKILETKALERFSSGETCTSKEKLTKGKHSSTLSAVSIQKILETKALERFSSGETCTSKEKLTKGKDFQTKGIHGAEPNGQNGNLLRGHVDGIENSESFSLMEDSSTFSVDGDVTVIYKRKGGRESCQSHNDWLHTVPLAPDVVSMSFVPITTLLNGVPGTGFLSHAINLYLRYKPPLQELSNFLEFQLPKEWAPAFGDLPLGPPRKQQEVPSLQFRLMGPKLHINTTPVVVGKRPVTGLRLYLEGKKSNRLAIHLQYLTAVPQILKTLWVEDGGGEEEWVGPEEDFSKYLEPVQWRNFSHVCTAPVENSETWLGGPGGALVVVGARLQVQQYGAKKVLFLHLLYSRIAKARIRRSEWDHMPASQQKSGLFSTLISTTFSSAAAQSPAPPKPVVINSAIYPEGPPVPGQMPKLLKFVDTTEMTRGPHDLPGHWLVTGAKLLLERGKISLRAKYSLLLYSVE

SEQ ID NO: 426 - protein, 593 aa, Davallia fejeensis
MAYGKDAAALAAVEALGCGFDLTSDYRLKYKKGSLLQLQHSHNKDLTIPGGISIPDVSRDIKCDKGERMRFASEVMPFQQMSQWFNQNASIEGKIPLGLFNAMFDLSGSWQDDANRIKNLAFNGSFITLYKLHLPMSNLVLREEVKKDVPSVWDPKNLARFIEKYGTHIIVSASVGGQDVLYLKENSSSSLSAQDIHKKLKSAGDEYFSDNGGKSNADFKGSENLPLHSQPIRGTIAHSAQLLISNKDYTVMSQRRGGYFLAKTHCEWQETVNMYPEAISLSFVPITSLLLGAAGSGFLQHAINLYLRYKPPVSDLQYFLDFQVPRQWIPVHNELPLRLARKQAFSPSLQFSLMSPKLYINNTEVVVNRKPVTGIRLYLEGRKNNRLGIHLQHLSVLPQSLCQIWSEASQVESPQWNGSNDAPNDWFEPVEWKCFSHVCTQPIKYKPEWQNERGSAFVVTGARLDVKAHGLRSVLHLHLLFSKIPGCTIQRSRWDQHPASEKMGFFSSISTTFSSTIKAGKKGPPVVVDSAVFMGGPPRPIQSPKLLKFVDTAELTKGPQDAPGHWVVTAARLELDRGKIAIKVKFSLLNYTE

SEQ ID NO: 427 - protein, 610 aa, Asplenium australasicum
MASKHDIPNAARVANLAFQSLGRGFDLTCDLRFSSCKDVHGAPLIELSDKDLRKVSLPGGVIVPNVPTIVKCDKGEQTHFRSDILTFDQMSQEFNHGLSLSGKVPSGFFNYMFNFTGSWQKDASATRHLALDGWFYTLYTLEMPRSQLVLKEDIKAAIPTSWEPAALARFIETFGTHIIIGAKIGGKDVVYLKQHQVSTSTLADFQKLLAEVSEERFSQTEGRASVGSKDSHSNNKRSMQFKSWTAPLDSFSQIIYNDKHHVTIIPRRKGGFDHGQSHSDWVHTVPLAPDVISVSLVPITSLLNGVPGSGFLSHAVNLYLRYKPPTEELRQFLEFQLPREWAPVFSELPLTLCRREQSPSTLQFTLMGPKLKVNKSQVTIGRRPVTGMRLFLEGKRCDRLSIHLQHLSAMPNFLTSFWEDHPFAREATWQDPDDYSTKYFEPLQWKNFSHICTAPVENTETWIGDHAGASVVVGAQLAVKSYKLRNVLYLRLLYSKIPEAKIRRSEWDHVPALAQKSGMFSSFFSTTFSSTAVTGAAKAPAVVINSGVYPEGPPKPVQDPKLLKFVDTTEMTKGPQDMPGHWLVTGAKLYLDRRKISLRVKYSLLTVSLD

SEQ ID NO: 428 - protein, 642 aa, Asplenium australasicum
MASTVGGLAAMQAQSSEAAQPPNMSFTAFSIAQQAVDALGRGYNVNLDLSLSYCKQGKRLIEIDESGPTQDLLLPGNIIIPNMPASIKCDKGDRTRFTTEVLKFNEMSEQFNQNLSISGKIPTGHFNTMFNFSGSWQKDASQVKTLALDGFFINLYTVELPRAQLTLKEEVRAAVPTSWDPAALASFVKKYGTHVIVGVKIGGKDVVCLKQHHTSQLSTIRVQKILEEKAKERFTPIAGGTSKEKINKGKIRDGSPYGSNAMNGSKDGLSLSWMNDSLSDLLTVETDDVRVMFKRKGGKDVSQSHEEWLHTVPSSPDIVSMSFVPITSLLNGVTGTGFLSHAINHYLRYKPPIDQLRHFLEFQLPKDWAPAFGDLPLGPPRKQQASPSLQFRLMGPKLQVNTTPVVVGKRCVTGIRLHLEGKKSNRLAIHLQFLTVVPQILQSRWEDDQLEDWEGPDTDFSKYFEPVMWRSFSHVCTAPVESREPWAADEMAGEAALKGALVVTGAQLDVEQHGSKKVLFLRLLYSKIHKAMNRRSEWDHTPASSQRSGIFSTLISTPFSSAAASSPAAAKPVHVNSAIYPDGPPPANSQAPKLLKFVDTSEMTRGPLDLPGHWLVTGAKLCVERGKIAVRAKYSLLLYSED

SEQ ID NO: 429 - protein, 333 aa, Vernonia noveboracensis
MDYSEKPMELRAFDSLGLGFDFASDFRLKFAKACPGGGRLVVLDESRKRDIVLPGGGATISGVSEDIHCDKGDHVRFKSDVLEFNQMSELLNQKASVQGKVPSGYFNALFDLSGTWLNDVADAKRLAFDGYFISLYYLHLTASPLVLQDRVKKSVPTHWNPALLARFIQTYGTHIIVGMGVGGQDVICVKQKPSSTISPAELRGHLEDLGDSHFSDGTSPSLLERKSKDGKKKVPEVFNRMLQPHTMQFTNITETSSKDGLTIIGSKRGGDVFSDSHSKWLQTVGASPEAILFKFVPITSLLNGVPGSGYLSHAINLYLRCQCFKFNQKPSFS

SEQ ID NO: 430 - protein, 597 aa, Hedera helix (Galaxy)
MSNSSDHGIVGRALSSLGKGFDLTSDFRLKYCKGKDRLVLLNETQTKELQVPGFGSFNHVSNDIKCGKGDRTRYQSDILDFNQMSEFINQKCSVPGKIPSGLFNSMFGFEIGSWAKEAANTKYLGLDGYFILLFDLHINRYPLVLSDEVRNAVPSTWDPSALARFIEKYGTHIIVGLGIGGQDVVLLRQDKSSNVEASQLKKNLDQLGDQLFTGSCTFTPKDQKQKALPVFNVFDQQSLLSDNFSSVKTKNGIHVICSKRGGDVSANTHCEWLLTVPSMPDAIQFSFIPITSLLKGVPGNGFLSHAINLYLRYKPPLADLQYFLDFQVHKIWAPVHSELTLGPATIRPTRMAALHFNLIGPKLYVNTSQVTVGRRPVTGIRLYLEGMKCNRLAIHLQHLSNTPQFLHNKIDDTLLLWRGSEEFSNHGYFEPIQWKKFSHISTAPVKYDPKWSSEKDVTFIVTGAQIYVKKHDSISALHLRLLYSKVSGSCIVQSNWMQCQSDHSQKSGLLSALSSSILFGGSSEKEELKKVVVDSGVYPNGPPVPVQTQKLLKFVDMSELCRGPSDSPGHWLVTGAKLQLEKGKICLHVKFSLLNTF

SEQ ID NO: 431 - protein, 357 aa, Tupidanthus calyptratus
MEEEGGKPIEVIAMESLGLGFDFASDFKLKFAKRCPDGAGDDGRLVVIDEANKRDVVFPGGGVIRGVPESIRCGKGDRIRFKSDVLKFNQMSELINQKSSVQGKVPSGYFNAMFDLSGSWFNDAADSNHLAFDGYFITLYCLHLTASPLVLRDKVKKSVPSHWNPASLSRFILTYGTHIIVGLAVGGQDVICVKQRPSSGIPPAELRGYLEDLGDCMFSDGRNPVLERKTRDGKQKVPEVFNRMLQSHTMQFSSITETSSKDGLTILSSKRGGDVFSQNHSNWLQTVASNPEAICFKLVPITSLLTGVPDKPAPEDLRYFLEFQVPVQWAPLFCELPLRHQRRKASCPLLQFAFLGP

SEQ ID NO: 432 - protein, 299 aa, Tupidanthus calyptratus
MSEQFNQEMSLTGKIPSGVFNTMFEFTGSWQKDAAHTKTLAFDGLFITLYTVALDKSQMVLSDHVKKAVPSSWDPAALARFIEKFGTHIIVGVKMGGKDVIYMKQQHSSSLQPSDVQKRLKTIADKRFVDARGQSGMDSEQTYQKDKFQVREQRLRFADTSLSSSYSYKEDIVSICMRRGGNDNKNLTHNEWLHNVQLEPDVISMSFIPITSLLNGVSGSGFLSHAINLYLRYKPPTEELHQFLAFQLPLHWAPVFSVHPLGLQPRQQSTASLQFSFMGPKLHVNTSPVDVGKRPVTGL

SEQ ID NO: 433 - protein, 611 aa, Adiantum trapeziforme var braziliense
MASKHEDSNAAKVARLAIETLGRGYDLTCDLRFSSCKDADGASLIEINDKETHELTLPGGVVIGNVPTIVKNDKGERTHFRSEILTFDQMSQQFNQGLSLSGKIPCGLFNHMFNFSGIWQKDASTTRHLALDGWFYTLYTLEIPRSQLVLKEDIKALVPASWEPAALARFIENFGTHIIVGAKIGGKDVIYMKQHQSSPSTSVEFQKLLAEVSDERFLQSEGRSTSVGSMDNSSHKKRNIEFQSWSAQLDTFSQIVYNDKHHVTIIPRRKGGIDHGESHSEWIHTVPLAPDIISVILVPVTFLLSGVAGSGFLSHAVNLYLRYKPPVEELRQFLEFQLPREWAPVFGDLPLTLSRKDRSPSTLQFTLLGPKLKVSKMQVTVGKKPVTGMRLYLEGKKCDNIAIHLQHLSAIPRFLQPLWEDHPFAGEATWQDPDDYSTKYFEPVQWKNFSHVCTAPVENTETWIGDHAGAAVVVGAQLAVKNFGLKNVLYLRLLYSRIPEARIRRSEWDHMPATTQKSGMFSTLFSTTFSSTAAPAPAKASPVVLNSGIYPEGPPKPVQDPKLLKFVDTTEMTKGPQDMPGHWLVTGAKLYLDKKRISMRVKYSLLSISSD

SEQ ID NO: 434 - protein, 598 aa, Rumohra adiantiformis
MASGKDAAALAAVEALGCGFDLTSDYRLKYRKGPLLHLQHSYTKDLTIPGGITIPDVSRDVKCDKGERIRFASEVMQFQQMSQLFNQNASVEGKIPLGFFNAMFDLSGSWQDDANQIKSLAFDGCFITLYKLHLTRSNLVLQEEVKKDIPSAWDPQSLAKFIEKYGTHIIVSASVGGQDALYLKENYSSLLSVQDIHKKLKSVGDDYFSDIGGKRNSNLKDSETLPLNALSSQPFRGKVAHTHSTQLLITEKDFTIISQRRGGFHFAKTHCEWQETVNIVPEAISLSFVPITSLLLGVAGSGFLQHAINLYLRYKPPVSDLQYFLDFQVPRQWIPIHNELPLRLARKQASSPSLQFSLTSPKLYINNNEVVVNRKPVTGIRLFLEGRKSNRLAIHLQHLSVLPQSLGQFWSETSQMESPRWNGSNDAPKDWLEPVEWKCFSHVCTQPIKYKPEWLNERGSAFVVTGARLDVKVQGLKSVLHLHLLFSKIPGCTIQRSRWDQHLAEEKTSFFSSISTTFSSTAKAGKKGPPVVVDSAVFIGGPPRPIQSPKLLKFVDTTELTKGPQDAPGHWVVTAAQLELDRGKISVRVKFSLLNYAE

SEQ ID NO: 435 - protein, 396 aa, Tupidanthus calyptratus
MEGGEETVKPIGLRAMESLGLGFDFASDFRLKFAKRCPGAGGDDRLVVLDEASRRDVVFPGGGVIRGVPECIRCDKGDRIRFKSDVLKFNQMSELVNQKSSVQGKVPSGYFNAMFDLSGSWLNDAADANHLAFDGYFITLYCLHLTASPLVLRDKVKKSVPSHWNPASLSRFILTYGTHIIVGLAVGGQDVICVKQRPSSGIPPAELRGYLEDLGDCMFSDGRNPVLERKTRDGKQKVPEVFNRMLQSHTMQFSSITETSSKDGLTILSSKRGGDVFSQNHSNWLQTVASNPEAICFKLVPITSLLTGVPGSGYLSHAINLYLRYKPAPEDLRYFLEFQVPVQWAPLFCELPLRHQRRKASCPLLQFAFLGPKIHVSSTQVIYLSTQTDMRMHRSL

SEQ ID NO: 436 - protein, 670 aa, Asplenium australasicum
MASTVGGLAAMQAQSSEAAQPPNMSFTAFSIAQQAVDALGRGYNVNLDLSLSYCKQGKRLIEIDESGPTQDLLLPGNIIIPNMPASIKCDKGDRTRFTTEVLKFNEMSEQFNQNLSISGKIPTGHFNTMFNFSGSWQKDASQVKTLALDGFFINLYTVELPRAQLTLKEEVRAAVPTSWDPAALASFVKKYGTHVIVGVKIGGKDVVCLKQHHTSQLSTIRVQKILEEKAKERFTPIAGGTSKEKINKGKIRDGSPYGSNAMNGSKDGLSLSWMNDSLSDLLTVETDDVRVMFKRKGGKDVSQSHEEWLHTVPAAPDIVSMSFVPITSLLSGVMGTGFLSHAINHFLRYKPSIAELHHFLEFQLPKEWAPANHYLRYKPPIDQLRHFLEFQLPKDWAPAFGDLPLGPPRKQQASPSLQFRLMGPKLQVNTTPVVVGKRCVTGIRLHLEGKKSNRLAIHLQFLTVVPQILQSRWEDDQLEDWEGPDTDFSKYFEPVMWRSFSHVCTAPVESREPWAADEMAGEAALKGALVVTGAQLDVEQHGSKKVLFLRLLYSKIHKAMNRRSEWDHTPASSQRSGIFSTLISTPFSSAAASSPAAAKPVHVNSAIYPDGPPPANSQAPKLLKFVDTSEMTRGPLDLPGHWLVTGAKLCVERGKIAVRAKYSLLLYSED

SEQ ID NO: 437 - protein, 347 aa, Asplenium prolongatum x Asplenium antiquum (Kurata)
MFKRKGGKDVSQSHEEWLHTVPAAPDIVSMSFVPITSLLNGVMGTGFLSHAINHFLRYKPSIAELRHFLEFQLPKEWAPAFGDLPLGPPRKQQASPSLQFRLMGPKLQVNTMPVVVGKRCVTGIRLHLEGKKSNRLAIHLQYLTAVPQILQGLWEDYQPEKWEGPDTDFSRYFEPVLWRSFSHVCTAPVESKEPWVDEMRGEPVLKGALVVTGAQLDVEQHGSKKVLFLRLLYSKIRKVRIRRSEWDHMPASQQRSGIFSTLISTHFSSAPSSPSKPVQVNSAIYPDGPPPANSQAPKLLKFVDTSAMTRGPLDLPGHWLVTGAKLDVERGKIAVRAKYSLLLYSAD

SEQ ID NO: 438 - protein, 593 aa, Platycerium bifurcatum
MASAKEAAALAAVEALGCGFDLTSDYRLKYKKGSLLELQHSHNKDLTIPGCITIPDVSRGIKCDKGEHMRFTSEVMQFQQMSQWFNQNASVEGKIPLGLFNAMFDLSGSWQDDANRLKNLAFDGCFITLYKLHLTRSNLVLREEVKNDIPSVWDPKSLAKFIEKYGTHIIVSASVGGQDVLYLKENYSSLISAQEIRKKLKSAGDEYFSETSGKRNADFKHSETSPLNSQPFRGTIAGSAQLLISNKDYTLISQRRGGYYFAKTHCEWQETVNMYPEAISLSFIPITSLLLGAVGSGFLQHAINLYLRYKPPVSDLQYFLDFQVPRQWIPVHNELPLRLARKQAFSPSLQFSLMSPKLYIDNNEVVVSRKPVTGIRLYLEGRKNNRLAIHLQHLSVLPQSLGKFWSEGIQIEAPLWNGSSDAPNEWFEPVEWKCFSHVCTQPIKYKPEWSNEQGSAFVVTGAQLGVKAHGLKSVLHLHLLFSKIPGCSIQRSRWDQHPAAEKTGFFSSISTTFSTTTKAGKKGPPVVVDSAVYMGGPPRPIQSPKLLKFVDTAELTKGPQDAPGHWVVTAARLELDRGKIAIKVKFSLLNYAE

SEQ ID NO: 439 - protein, 650 aa, Lygodium flexuosum
MKPAAVTLRPNFYTSSSSSAPSDPASVAKQAVDALGRGYDVTGDLWLSKCREPLIVDLAESSPTQDLAIPGGISLPSVPAPIKCDKGDRTRFASDILSFSEMSEQFNKTLSIAGKIPLGLFNSMFGFTGLWQKDASSTKTLALDGVFINLYSVEVPRTHLNLREEVRKAVPSSWDPAALASFVDKYGTHVIVGVKIGGKDVIYVKQRHSSPLSAVSIQKILETKAVERFSSGETCTSKEKLTKGKDFQTKGIHGAEPNGQNGNLLRGHVDGMENSESFSLMEDSSTFSIDGDVTVIYKRKGGSESCQSHNDWLHTVPLAPDVVSMSFVPITTLLNGVPGTGFLSHAINLYLRYKPPLQELSNFLEFQLPKEWAPAFGDLPLGPPRKQQEVPSLQFRLMGPKLHINTTPVVVGKRPVTGLRLYLEGKKSNKLAIHLQYLTAVPQILKTLWVEDGGGEEEWVGPEEDFSKYFEPVQWRNFSHVCTAPVENSETWLGGPGGALVVVGARLQVQQYGAKKVLFLHLLYSRIAKARIRRSEWDHMPASQQKSGLFSTLISTTFSSAAAQSPAPPKPVVINSAIYPEGPPVPGQMPKLLKFVDTTEMTRGPHDLPGHWLVTGAKLLLERGGRSTCSWSDAQTLEVCGHYRDDKRAT

SEQ ID NO: 440 - protein, 617 aa, Waldsteinia ternata
MRMEEATTEKPIEVRALEALGQGFDLSSDFRLKFAKGLDGSKGRLVVLNEESKRDIVIPSGSGGGVVIHGVPQDIHCDKGDRIRFKSDVLEFNQMSELLNQKSSVQGKIPSGYLNSIFGLSGDWLQDAAETKYLAFDGFFISLYNLHLTASPLVLRNKVQKSVPSRWDPAALSRFIHSYGTHIIVGMAVGGQDLVCVRQKSSSPVPPADLRRNLEDLGDFLFSDGPSLLRGKTRNGKQKIPEVFDRILQSNTMQLTTISETSSKDGLTVVCSKRGGDVFLNSHSNWLQTVLAEPEAIIFKFVPITSLLTGLPGSGYLSHAINLYLRYKPDLEDLQHFLEFQVPRQWAPMFCELPLSHQRKKASCPSLQFSFMGPKILVSSMQVSTSQKPVVGLRLYLEGKKCNRLAVHVQHLSSLPNTMELKLANTRTTRPSWWRGSDDSEFSGQFLEPIKWKRYSSICSSVVRYDPNWLKGDPGGVYIVTGAQLLSKGKWPKTILHLRLHYTFLPSCAIRKTEWAGSPEPSHKSTFLMNLSTTFTMTQRTVTDQQKQDPAALNSGVYPEGPPVLNRSAKLLKFVDTAEVVRGPHDAPGHWLVIAAKLVKEGNRIGLHTKFALLDYW

SEQ ID NO: 441 - protein, 376 aa, Sphaeropteris cooperi
MGSEAAARKVALDAVQSLGRGFDVTADFRTKFCKKRLVHIVNDGLESLTLPGDITIDAPSVIKCDKGECTRHTSDLMQFQQMSQAFNKRALIDGKIPLGHFNAMYDFTGSWFEDAMQTKNLAFDGKFITLFQLQLTSSLLLRKEVKNAVPSAWEPAALARFISLYGTHIVVRVSVGGQDVLYLKENASSMMSSADVHKHLKNLGDQMFAEKGVQKIQDGNSLRGCSIAPVEIDGTNILYKSKDLTIIAKKRGGRLCAKTPSEWQATVMSAPDVIMMSFVPITALLSGTPGSGFLNHAINLYLRYKPPIEDIRCFLEFQVPRQWAPVYSDLPLGPPQRAITLPSLQFCLMGPRLYVNTAQVGRKNHFNWCLFGEVRL

SEQ ID NO: 442 - protein, 594 aa, Colysis wrightii (Ching)
MASAKDATALAAVEALGCGFDLTSDYRLKYKKGPLLQLQHSHNKDLTIPGGITIPDVSRDIKCDKGERMRFASEVMHFQQMSQWFNQNASVEGKIPLGLFNAMFDLSGSWQDDANRLKNLAFDGCFITLYKLHLTRSNLVLREEVKNDIPSVWDPKSLAKFIEKYGTHIIVSASVGGQDVLYLKENYSSLLSAQDIRKKLKSAGDEYFSEISGKKNADFKDSETLPLNSQPFRGTIAASAQLLISNKDYTVISQRRGGYYFAKTHWEWLETVNVYPEAISLSFVPITSLLSGAAGSGFLQHAINLYLRYKPPVSDLQYFLDFQVPRQWIPVHNELPLRLARKQAFSPSLQFSFMSPKLYINNNEVVVNRKPVTGIRLYLEGRKNNRLAIHLQHLSVLPQSLSQFWSEDIQIGLPQWNGSNDAPSDWFEPVEWRCFSHVCTQPIKYKPEWSNDRGSAFVVTGARLDVKAYGLKSVLHLHLLFSKVPGCSIQRSRWDQHLAEEKTGFFSSISTTFSTTTTKAGKKGPPVVVDSAVFMGGPPRPIQSPKLLKFVDTAELTKGPQDVPGHWVVTGARLELDRGKIAIKVKFSLLNYAE

SEQ ID NO: 443 - protein, 643 aa, Asplenium nidus var plicatum
MASAVGRFAAAQAQSSEAAQPQIASSSALSIAQQAVDALGRGYDVNFDLRLGYCKQRKHLIENDELGPTQDLLLPGNISIPNLPASIKCDKGDRARLTTEVLTFNEMSEHINQNLSISGKIPTGHFNNLFDFSGSWQKDASQVKTLALDGFFINLYTVELPRAQLTLKEEVRAAVPSSWDPAALASFVEKFGTHVIVGVKIGGKDVICLKQHHSSQLSAVGVQKILEAKAKERFTSIVGGTSRENNKGKIMDGFTYGSNATNTVNGSKDGLHPSWLDSSFSDHPPVETDDVKVMFKRKGGRAVSQSHEEWLHTVPSSPDIVSMSFVPITSLLNGVTGTGFLSHAINHYLRYKPPIDQLRHFLEFQLPKDWAPAFGDLPLGPPRKQQASPSLQFRLMGPKLQVNTTPVTVGKRCVTGIRLHLEGKKSNRLAIHLQFLTVVPQILQSRWEDDQLEDWEGPDTDFSKYFEPVMWRSFSHVCTAPVESREPWAADEMAGEAALRGALVVTGAQLDVEQHGSKKVLFLRLLYSKIHKATNRRSEWDHTPASSQRSGIFSSLISTPFSSAAASPAAAKPVHVNSAIYPDGPPPANSQAPKLLKFVDTSEMTRGPLDLPGHWLVTGAKLCVERGKIAVRAKYSLLLYSED

SEQ ID NO: 444 - protein, 427 aa, Verbascum chaixii (Vill)
MAYYGHSNARLDAKAAAEKAVSVIGFGYDLTSDIRLSACKPGPSGSGLIELERSRTKDLVVPGNVVVSNVSGSIKCDKGERTRFSSDALTFNQMSEHFNQELSLSGKIPSGLFNTMFGFKGCWQNDASTSKILAFDGWLISLYTIELERSQITLSDKVKQEVPSTWDPPALAEFIEKYGTHVIVGVKMGGKDAIHIKQLKNSNLQPTEVQKLLKQLADEQFSEDGNEDPTADSDISSGKSKVQQSLIWDLQIPFTSTVRPPVVSHSKTDDLLSIHIRRGGLDSGQSHKKWLSTVSQYPNVISMSFVPIASLLSGTRGSGFLSHAINLYVRYKPPLEELTQFLEYQLPRQWAPAYNDLPLGHCRRKKASPSLQFSLLGPKLYVNTVKVDTGNRPVTGLRLYLEGKKSDHLAIHLQHLSTLPQSCCLCV

SEQ ID NO: 445 - protein, 520 aa, Verbascum chaixii (Vill)
MALKLPAAEAAKVAIHSIGCGYDISLDLRLKYCKGDSSLIEIDEDHGREIVLPGGVTIPNVPKSIKCDKGERTRFRSDVLTFQQMSEQLNQELALTGKIPSGLFNAMFEFSGCWQKDAAYTKTLSFDGMFITLYTVALEKSHMVLRDNVKKEVPSSWDPASLARFISKFGTHVIVGLKMGGKDVIYMKQQHSSSLQSADVQKRLKAMADKRFLDANGQSELNSEQLYQSGKLEMKESRLRFADTGSSSSYSHKDDIVSICKRRGGTDGRNLNHKEWLQTVQSEPDVISMSFIPITSLLNGVSGSGYLSHAINLYLRYKPPIEEVHQFLEFQLPRQWAPVFSDLPLGPQRRQQSTASLQFSLLGPKLFVNTSAVDVGKRPVTGLRLYLEGRRSNRLAIHLQHLSSLPNIFQLEDDPNGNFRQESHDRRYYEKVQWKNFSHICTAPVESDEELSIVTGAQLQVGDYGFKKVLFLRLRFSTVLGAVSVKYPEWDGSPGLARKSGLISTLISHHFTAVQKPSPN

SEQ ID NO: 446 - protein, 600 aa, Symphoricarpos x chenaultii (Hancock)
MALKLSAPEAAKVAIQSIGCGYDISLDLRLKYCKGDSVNPRLIEIDEDQGREVVLPGGIVIPNVSKSIKCDKGERTRFRSDVLSFQQMSEQFNQEMSLTGKIPSGLFNSMFLFSGSWQKDAANTKTLAFDGVFITLYTVALGKSQMVLCDHVKKAVPSSWEPAALARFIERFGTHIIVGVKMGGKDVIYVKQQHSSSFQPADVQKRLKTIADKRFLDANGQYGVDSEQTYQNDKFENRQHRLRFADTSPSSSYSYKEDIARICKRRGGSDNEALSHNEWLHTVQLEPDAISMSFIPITSLLNGVTGSGFLSHAINLYLRYKPPIEELHQFLEFQLPRQWAPVFNELPLGPQRRQSTSSLQFSFMGPKLFVNTTPVDVGKRPVTGLRLYLEGKRSNRLAIHLQHLSSLPRVFQLEDDPNGNFRHESYDRKYYEKVQWKNFSHVCTAPVESDEDLSIVTGAQLQVGDYGFKKILFLRLRFSTVIGAASIKHPEWDGSPGLARKSGLISTLISHHFTTVQKPAPQPADVNINSAVYPGGPPTPVQALKLLKFVDTTEMTRGPQESPGYWVVSGARLVVEKGRISLRVKYSLLTIIPDEEVLEE

SEQ ID NO: 447 - protein, 601 aa, Adiantum pedatum
MASEREAARTAALVAVESLGCGFDLTSDYRLKYRKGPLLQLQHNSIKDLTIPGGITIPDVSRDVTCDKGERMRFASEVMQFQQMSQWFNQNASVEGKIPLGLFNAMFDLSGSWQDDANQIKNLAFDGCFITLYKLHLTRSNLVIRDDVINDIPSVWDPQGLARFIEKYGTHIIVSASVGGQDVLYLKENQSSLLSPQDIHKQLKSAGDDYFLDKDADRSLNVKDSETLPLNSLKGQPSRATVAHIHSAQLLISNKDFTIISQRRGGHYFCKSHSEWQETVNVFPEAISLSFVPIASLLLGVAGCGFLQHAINLYLRYKPPVSDIQYFLDFQVPRQWIPSHNELPLRLARKQAFSPSLQFSFMGPKLYINSSEVVVDGKPVTGLRLFLEDRKSNRLAIHLQHLSVLPQSLGKFWSEDTHKESPRWNGSNDAAKDWFEPVEWKCFSHVCTQPVKYKPEWLDVKGSAFVVTGARLEVKVHGLKSVLHLHLLFSNIPGCVIQRSRWDQPPAAEKTSFFSSLSTTFSSTARPGKKGPQVVVDSAVFVGGPPRPIQSPTLLKYVDTTELTRGPQDAPGHWVVTAARLELDKSKISLRVKFSLLSYME

SEQ ID NO: 448 - protein, 637 aa, Dryopteris erythrosora
MASALGGLATLPPQSSEAASLAFSVAQQAVDALGRGYDVNSDLWLRYCKRGERLIENDKSGPTQDLLLPGNIAIPNVSTSIKCDKGDRTRFTSDILTFNEMSEQFNQNLSIAGKIPVGHFNAMFGFSGSWQKDASMVKTLAMDGVFINLYSVELPRAQLTLKEEVRAAVPSSWDPAALASFVEKYGTHVIVGVKIGGKDVICLKQHRSSSLSAVGVQKILQSKARERFSSVDGCAAKEKINKGKIRDGSPYGSNGINAVNVLKDGMPLPWISDSSTDLSTVETDDVTVIFKRKGGRDASQSHAEWLHTVASTPDIVSMSFVPITSLLNGVTGTGFLSHAINHYLRYKPPIQELHHFLEFQLPKEWAPAFGDLPLGPPRKQAGSPSLQFRLMGPKLQVNTTPVVIGKRCATGLRLHLEGKKSNRLAVHLQYLTVVPQILQRLWEDDQPEEWEGPDDDFSKYFEPVMWKSFSHVCTAPVESSESWEDEGKGEAGPKGALVVTGAQLDVEQHGSKKVLFLRLLYSKIHKARIRRSEWDHTPASQQKSGIFSTLMSTTFSSAQAAPPKPVQVVVNSAIYPQGPPPTKSQAPKLLKFVDTTEMTRGPLDLPGHWLVTGAKLFVDRGKIAVRAKYSLLLYSVD

SEQ ID NO: 449 - protein, 301 aa, Marsilea mutica
MSEHFNKSLSITGKIPLGHFNSMFQFSGSWQKDASSVKALAYDGVFKSLYSLQMPTTLLTLKEEVKASMPSSWDPRALANFIENYGTHIIVGVTIGGRDVVCLKQLHGSSLSGDRVRKFLESSANERFLASGVSSHNAKGNSHKDDIGYNFINNVAMNEETILKDDMVNIIRKQRGGKQCLQSHKEWLQTVKDFPDILSMHFVPITSLLTGVTGSGFLNHAINLYLRYKPPIEELRYFLEFQLPKEWAPAFGDLPLGPPRKQIESPALQFRFMGPKLQVNTTQVTVGKRPVTGIRILFVCA

SEQ ID NO: 450 - protein, 387 aa, Phormium (Lancer Terra Cotta)
MEGEGEPVEIMALKALGLGFDLTNDFRLRFAKGWYPYRRLVELDEGNTRDIVIPGNLTIRDVPVDVGCDKGDRIRFRSDVLEFNQMSELLNQKSSIQGKVPSGYFNALFDLSGAWLDDAKNTKHLAFDGYFISLYNLHLRSSPLVLRDEVKKAVPSKWEPVLLSRFIRTYGTHIIVEMAVGGQDVICVKQSHSSTISTAELKLHLEDLGDILFSDGRNLSPLHRKGREGRNKVPDIFFKILQSNNLQLASYSETSSKDGITVICSKRGGDAYLCNHSKWLQTVPITPDAILFKFVPITSLLTGIPGSGYLSHAINLYLRYKPDPQDLQYFLEFQVPHQWAPMFNDLTLGPQRRKAFYPSMQFRFLGPRLRVNATQVLFILITCAYNL

SEQ ID NO: 451 - protein, 639 aa, Polystichum polyblepharum (Roeme x Kunze)
MASAVGASRLQSSEAAPSQNISSLAFSVAQQAVDALGHGYDVNSDLWLRYCKRGERLIENDKSGPTQDLLLPGNIAIPNVPTSIKCDKGDRTRFTSDILTFNEMSEQFNQNLSISGKIPVGHFNAMFGFSGSWQKDASLVKNLAMDGVFINLYSVELPRAQLTLKEEVRAAVPSSWDPAALASFVEKYGTHVIVGVKIGGKDVICLKQHRSSSLSAVGVQKILQSKAKERFSSVDGCAAKEKINKGKIRDGSTYGSNGMNAVNGLKDGIPLPWISDSSADLSTVETDDVTVLFKRKGGRDVQSHDEWLHTVASTPDIVSMSFVPITSLLNGITGTGFLSHAINHYLRYKPQIQELHHFLEFQLPKEWAPAFGDLPLGPPRKQAGSPSLQFRMMGPKLQVNTTPVVIGKRCVTGLRLHLEGKKSNRLALHLQYLTVVPQILQQLWEDDQPEQWEGPEDDFSKYFEPVMWKSFSHVCTAPVESSETWEDEGKGEAGPKGALVVTGAQLDVEHYGSKKVLFLRLLYSKIHKARIRRSEWDHTPASQQRSGLFSTLMSTTFSSAQSAPQKAVQVVVNSAIYPQGPPPAKSQAPKLLKFVDTTEMTRGPLDLPGHWLVTGAKLFVDRGKIAVRAKYSLLLYTVD

SEQ ID NO: 452 - protein, 513 aa, Polystichum polyblepharum (LW12418)
MASAVGAWPLQSSEAAPSQNISSLAFSVAQQAVDALGHGYDVNSDLWLRYCKRGERLIENDKSGPTQDLLLPGNIAIPNVPTSIKCDKGDRTRFTSDILTFNEMSEQFNQNLSISGKIPVGHFNAMFGFSGSWQKDASLVKNLAMDGVFINLYSVELARAQLTLKEEVRAAVPSSWDPAALASFVEKYGTHVIVGVKIGGKDVICLKQHRSSSLSAVGVQKILQSKAKERFSSVDGCAAKEKINKGKIRDGSTYGSNGMNAVNGLKDGIPLPWMSDSSADLSTVETDDVTVLFKRKGGRDVQSHDEWLHTVASTPDIVSMSFVPITSLLNGITGTGFLSHAINHYLRYKPQIQELHHFLEFQLPKEWAPAFGDLPLGPPRKQAGSPSLQFRMMGPKLQVNTTPVVIGKRCVTGLRLHLEGKKSNRLALHLQYLTVVPQILQQLWEDDQPEQWEGPEDDFSKYFEPVMWKSFSHVCTAPVESSETWEDEGKGEAGPKGALVVTGAQLDVEDMGR

SEQ ID NO: 453 - protein, 400 aa, Platycerium bifurcatum
MASAKEAAALAAVEALGCGFDLTSDYRLKYKKGSLLELQHSHNKDLTIPGCITIPDVSRGIKCDKGEHMRFTSEVMQFQQMSQWFNQNASVEGKIPLGLFNAMFDLSGSWQDDANRLKNLAFDGCFITLYKLHLTRSNLVLREEVKNDIPSVWDPKSLAKFIEKYGTHIIVSASVGGQDVLYLKENYSSLISAQEIRKKLKSAGDEYFSETSGKRNADFKHSETSPLNSQPFRGTIAKSAGDEYFSETSGKRNADFKHSETSPLNSQPFRGTIAGSAQLLISNKDYTLISQRRGGYYFAKTHCEWQETVNMYPEAISLSFIPITSLLLGAVGSGFLQHAINLYLRYKPPVSDLQYFLDFQVPRQWIPVHKKQSHYPSFQLHLYYWVRLEAAFCSMRSIFI

SEQ ID NO: 454 - protein, 608 aa, Sphaeropteris cooperi
MASKQHKPDAETVAKLAIQALGRGYDITCDLRFSSCKDANGTSLIELNDEKTQELSLPGGIVVPNVPTIVKCDKGERTHFRSDILTFDQMSQQFNQGLSLSGKIPSGLFNSMFQFTGAWQKDASTAKHLALDGWFYTLYTVEMPRSQLVLKEDLKALVPSSWDPVVLARFIETYGTHIIVGVKVGGKDVVYLKQHPSSPLTPVGFQKLLAEVSDERFSQVEGRSSMGSKENHNNKKRIIESYSWSAQMDTLSQMFSNEKQYVTIIPRRKGGHDSAHTHSEWIYTVPLAPDVISMSLIPITSLLSGVTGSGFLSHAVNLYLRYKPPIEELRQFLEFQLPRQWAPVFNELPLTLSRKERSPSTLQFSLMGPKVKVSNMQVTVGKTPVTGMRLYLEGKKCDKLAVHLQHLSAVPKVLQPLWEEHPFAGEPTWQDPEDYNSRYFEAIQWKNFSHVCTAPVENTDTWIGDHAGASVVVGAQLRVSSFGIKNVLYLRLLYSKIPEAKIRRSEWDHMPASMQKSGMFSTLLSTTFSSTPPPPKAPAVVMNSGVYPEGPPKPVQEPKLLKYVDMTEMTKGPQDMPGHWLVTGAKLYLDNRKISLRVKYSLLTISSD

SEQ ID NO: 455 - protein, 259 aa, Tupidanthus calyptratus
MGGKDVIYMKQQHSSSLQPSDVQKRLKTIADKRFVDASGQYGMDSEQTHQNDKFQIREQRLRFADTSPSSSYSYKEDIVIICKRRGGSDNKNLTHNEWLHNVQLEPDVISMSFIPITSLLNGVSGSGFLSHAINLYLRYKPPVEELHQFLEFQLPRQWAPVFSDLPLGPQRRQQSTSSLQFSLMGPKLYVNTTPVDVGKRPVTGLRLYLEGKRSNRLAMHMQHLSSLPKIFQLEDDPNGNFHQESYDRRYYEKVQWKNL

SEQ ID NO: 456 - protein, 264 aa, Tupidanthus calyptratus
MYPNKLIVIKVSGYDLALTVSLSSRCQSNSIRKYLFLAKFQQAISTLHFNSLGVGFNAAFQFTGCWQKDAANTKTLALDGVFITIYTIALEKSQITLCDHIKEAVPSSWDPAALARFIEKFGTHVIVGVKMGGKDIVYMKQQHSSPLQSDEVQKRLKHVADNRFSNASGHSTNPEKVYEREMLEINEPPQEFMDDSASSSYMDLEDITFFYRRRGGSNKKNLPHDKWCQSVQLEPDVISMSFIPISSLLSGINGNGFLTHAINL

SEQ ID NO: 457 - protein, 639 aa, Blechnum gibbum
MASAVGGLAAMQAQSSEGAPLQNTASLAFSVAQQAVDALGRGYDVNSDLWLRYCKRGERLIENDNSGPTQDLLLPGNIIIPNVSTSIKCDKGDRMRFTSDVLTFSEMSEQFNQNLSISGKIPVGHFNAMFGFSGSWQKDASQVKTLAMDGVFINLYSVELPRAQLTLKEEVRAAVPSSWDPAALASFLEKYGTHVIVGVKIGGKDMICLKQHRSSTLAAVGVQKILEAKAKERFSSVEGSAAKEKINKGKIRDGSAHEANGMNAVFGSKDGMPLSWMNDTAPDLENDDVTVICKRKGGKDISQSHDEWLDTVPSTPDIVSMSFVPITSLLNGVTGTGFLTHAINHYLRYKPPIQELHHFLEFQLPKEWAPAFGDLPLGPPRKQQGSPSLQFRLMGPKLQVNTTPVVIGKRCVTGLRLHLEGKKSNRLALHLQYLTVVPQILQRLWEDDQTEEWEGPDDDFGKYFEPVMWKSFSHVCTAPVESNEIWVDEAKGEHGPKGALVVTGAQLDVEQHGSKKVLFLRLLYSKIHKAKIRRSEWDHTPASQHKSGIFSALMSTPFTAQAAPVKPVHVVINSAIYPQGPPPAKSQAPKLLKYVDTTEMTRGPLDLPGHWLVTGAKLFVDNGKIAVRAKYSLLLYSVD

SEQ ID NO: 458 - protein, 534 aa, Platycerium wandae
MSEQFNQNLALSGKIPVGHFNAMFGFSGSWQRDASAVKNLAMDGVFITLYSVELPRSQLTLKEEVKAAVPSSWDPAALASFLEKYGTHVIVGVKVGGKDVICLKQHRSSSLSAVGVQKILEAKGKERFSSVEGSTAKEKINKGKIRDGSLFGSNGLNALNGSKDLPWMSDSSTDFSTVETEDVTVIFKRKGGRDRSQSHDEWLLTVPLFPDVVSMSFVPITSLLSGITGTGFLNHAINHYLRYKPPIQELHHFLEFQLPKEWAPAFGDLPLGPPRKQAGSPSLQFRLMGPKLQVNTTPVVIGKRCVTGLRLHLEGKKSNRLAIHLQYLTVVPQILQQLWQDDQSEVWEGPDEDASKYFEPVMWKSFSHVCTAPVESTETWEDEGKGDPESKGAQVVTGAQLDVLQCGSKKVLFLKLLYSKIHKARVRRYEWDHVPASQQKSGIFSTLMSTTFSSVQASPQKPVQVVVNSAIYPQGPPAANSQAPKLLKFVDTSEMTRGPLDLPGHWLVTGAKLFVDRGKIAVRAKYSLLLYSVD

SEQ ID NO: 459 - protein, 604 aa, Equisetum arvense
MTAQSRAREAVQALGRGYDVIHDLRLTYCKGDPGSCLVKLEQSQTQDLVIPGGIVIPGVSKSITCEKGERTRFKSDVLSFQQMSEQFNQWLSVPGKIPLGLFNATFGFSGHWQKDASSVKNLAMDGWLITLFSVELPKSHLVLREEVKKDVPSSWDPSALASFIEKYGTHIVVGVKIGGKDVVCVKQHQSSSVSAVDIQGLLKRKADERFAKTESDDVLNPEQKLDTEQNFMLNQSNRFQIYNVPSPVFSTKEDATTLCSRRGGNEMVQSHNQWLQSVTGSPDVILMNFVPITSLLNGVAGSGFLSHAVNLYLRYKPPVEELLHFLEFQLPRQWAPVYSELPLGPPRRECTTSSLHFSLIGPTLYVNTAPVNVGRRPVTGLRLYLEGRRCNRLAIHVQHLSAIPRVLHPLWEDHPFAADPKWQGPEELDPRYLEPVFWKNFSHVCTAPVENGDHWMGDSTSGSGAGAHVVIGARLGVRGVGLKNVLFLDLLYSKIPQAKVRRSEWDHTPAALQKSGFFSTLMSTTFSAPQQPIAKPAPINLNSGVFPGGPPVPVRMPKLLKFVDTSELTKGPQDMPGHWLVTGAKLYLDAGKISLRVKYSLLIY

SEQ ID NO: 460 - protein, 616 aa, Phormium (Lancer Terra Cotta)
MALKFPPRKAAEFAINSIGLGYDVAADIRLKYCKRETQDPCLIELDKDQLQDIVLPGGITVSNVPKSIKCDKGERTRFRSDVLSFQQMSEQFNQELSLSGKIPELSLSGKIPSGLFNYMFEFSNCWQKDAANTKSLAFDGWFITLYTVALAKSQIVLRDHVKQAVPSSWDPAALARFIEKFGTHVIVGVKMGGKDVIYVKQQHFSNLQPAEVQKILKDMADKRFLDVSGQYGMNSEEAFGKDKFDFKEQRLRFADSSSSSSYSTKEDIVRIFKRRGGNDNKDLPHPEWLNTVQYEPDVISMSFVPITSLLQGIPGSGFLSHAINLYLRYKPPTEELHQFLEFQLPRQWAPVFSDLPLGPQRKHQSTASLQFTFMGPKLYVNTSVVDVGKRPVTGLRLYLEGKRSNRLAIHLQHLSSLPRIFELREDPSSSYSRESHDRKYYEPIQWRHFSHVCTAPIEADEDNSIVTGAQLHVGHYGLKKVLFLRLHFSTVSNVTLVRNHEWDGSPGLAHKSGLISTLISTRFTAAIQKPPPRPADVYINSAVYPGGPPVPVQTPKLLKFIDTTEMVRGPQNPPGYWVVSGAKLQLERGKISLRVKYSLLTVLLPDDDDDDDDDDV

SEQ ID NO: 461 - protein, 516 aa, Doellingeria umbellata
MRFSSDILSFQQMSEQFNQEVSLSGRIPTGQFNAAFEFTGSWQKDAANTKALAIDGVFITLYNVTLEKSQIALCDHVKNAVPSSWEPAALAKFIENFGTHVIAGVKMGGKDTVYMKQQHSSTLTSDDVQRKLKDVAEKRFSGHHNDNPRKARDLEPLERNDYGLITLDPAIEDITFFWRRRGGSYGKNLDHRTWCQTVQLEPEVISMTFIPITSLLSGIDGNGFLTHAINLYIRYKPPIEELQQFLEFQLPTRWAPEFGELAVGPEGKPHHSASLQFRFMGPKLYVNTNQVDVGNNPVTGLRLYLEGKRNDCLAIHLQHLSSIPKSFKLMLEPNTNLAPNFHDRRYHEKVQWKSFSHICTAPVESDDELSIVTSAEFEVSDSGVKRVLFLRLRYAKVVGATVVRKPEWDGSPVLSQKSGIVSALISTRFSNAQKPPPQPKDIVVNSALPIGPPISAQGKKLLKFVDTTELVRGPQDLPGYWVVSGARLMVDKSKISLRAKFSLLAVISGNEETYSG

SEQ ID NO: 462 - protein, 380 aa, Tupidanthus calyptratus
MDSEQTHQNDKFQIREQRLRFADTSPSSSYSYKEDIVIICKRRGGSDNKNLTHNEWLHNVQLEPDVISMSFIPITSLLNGVSGSGFLSHAINLYLRYKPPVEELHQFLEFQLPRQWAPVFSDLPLGPQRRQQSTSSLQFSLMGPKLYVNTTPVDVGKRPVTGLRLYLEGKRSNRLAMHMQHLSSLPKVFQLKDDPNGNFRQESYDHRYYEKVQWKNFSHICTAPVESDEDLSIVTGAQLEVGDYGFKRVLFLRLRFSTVLGAVAVKHPEWDGSPGLARKSGLISTLISHHFTATLKPPPQPADVNINSAIYPGGPPAPTQSAKLLKFVDTTEMTRGPQETPGYWVVSGARLMVEKGRISLRVKYSLLTVILPDEEALEEP

SEQ ID NO: 463 - protein, 298 aa, Waldsteinia ternata
MRFGSDVLSFQQMSEQFNQELALSGKIPSGHFNTAFEFTGGWQKDAANTKTLAFDGVSITLYSVALEKSQVSLREQVKQDVPSSWDPTALARFISKYGTHVIVGVKMGGKDTIYAKQMYSSPVQPADVQKKLKDMADKMYVDGNSHSGVTSEKFHERDKFIKEQGLGIMNAIPSSSYASVESQDIKFVCKRKGGSLHKNLRHSEWSQTVQLEPDVISMSFVPITSLLSGIHGSGFLTHAINLYLRLQTNHQLKNCINFWISKFQGNGHQCLVSLLLVPRGGKKVLHLYSLASWVPSFM

SEQ ID NO: 464 - protein, 407 aa, Sphaeropteris cooperi
MMSSADVHKLLKEFGDQMFAKKGGQKMQDGNHLSRRSIAPDETMYVDGTKSLFKNKDVTIFTKMRGGLLSAKTPTQWQATVTSTPDVIMMSFVPITSLLSGTPGSGFLNHAINLYLRYKPPIEDIRCFLEFQVPRQWAPVYSDLPLGPPQRAITLPSLQFCLMGPRLYVNTAQISVGRKPVTGLRLYLEGRQNNRLAIHLQHLASLPRVLEPYWNPEIHEQSNWHGSDNVESSEWFEHVQCRTFSHVCTARVKYNPVWTRSKSGVFVVTGAQLEVKSYGLKNVLHLRLQFSRIPGCTILKSRWYQPCSSNLSEKSRFFSTLSTAFTSHMVKKPVQPSPVVVDSGVFLGEPPIPIQQPKLLRFVDTRELTKGPQDMPGHWLVIGAQLDVDGGKISLNAKYSLLNFDFK

SEQ ID NO: 465 - protein, 582 aa, Nephrolepis obliterata
MASKLDIPNAAKVANIAIQSLGRGYDLTCDLRFSTFKDVNGASLIELRNNETLELSLPGGVVVTNVPAIVKCDKGEQTHFRSDIVTFDQMSQQFNQGLSLSGKIPSGLFNYMFNFTGSWQKDASTTRHLALDGWFYTLYTVEIPRSQLVLKEDIKASVPTSWEAAALARFIETFGTHIIKLLAEVSDERFAQTEGRTSVGSKDGRINKKKRGIEIQSWAAHLDTFSQITYNEKHHVTIIPRRKGGFDHGQSHSDWIHTVPLAPDIISVSLIPITSLLHGVSGSGFLSHAVNLYLRYKPPIEELRQFLEFQFPREWAPVFSELPLTLSRREHSVSTLQFTLMGPKLKVSKLQVTVGKKPVTGMRLFLEGQRCDKLAIHLQHLSAVPRFLQPLWEDHPFAREVTWQDPDDCSTKYFEPVQWKNFSHVCTAPVENMETWIGDHAGACVVIGAQLAVKSFGLKNVLYLRLLYSKIPEAKIRRSEWDHMPASTQKSGMFSSFLSSTFSSAPAPTKVPAVVINSGIYSEGPPKPVRDPKLLKFVDTTEMTKGPQDMPGHWLVTGAKLYLDKGKISLRVKYSLLTVSSD

SEQ ID NO: 466 - protein, 311 aa, Waldsteinia ternata
MRFGSDVLSFQQMSEQFNQELALSGKIPSGHFNTAFEFTGGWQKDAANTKTLAFDGVSITLYSVALEKSQVSLREQVKQDVPSSWDPTALARFISKYGTHVIVGVKMGGKDTIYAKQMYSSPVQPADVQKKLKDMADKMYVDGNSHSGVTSEKFHERDKFIKEQGLGIMNAIPSSSYASVESQDIKFVCKRKGGSLHKNLRHSEWSQTVQLEPDVISMSFVPITSLLSGIHGSGFLTHAINLYLRYKPPVEELHQFLDFQVPRQWAPVFGELALGPQRRQESTASLQFSFMGPKLYVNTNPVCYHYYFFLF

SEQ ID NO: 467 - protein, 618 aa, Nephrolepis cordifolia (Duffii)
MQPQSSAAAPPQNTPFSVAQQAVGALGRGYDVNSDLWLRYCKRGAQLIENKPGPTQDLHLPGNIVIPNVPSSVKCDKGDRTRFTSDILTFNEMSEQFNQNLSISGKIPVGHFNAMFGFSGSWQKDASVVKTLAMDGVFITLYSVELPRTQITLKEEVRAAVPSSWDPAALASFVEKYGTHVIVGVKIGGKDAICLKQHRSSSLSAVEVQKILETKAKERFLSVEGNTAKERINKGKIRDGSPYGSNGMAALNLSKDETTLSWLSDTSTDHSTVETNDVTVIFKRKGGRENSTSHDEWLHTVASFPDIVSMSFVPITSLLNGITGTGFLSHAINHYLRYKPPIQELHHFLEFQLPKEWAPAFGDLPLGPSRKQPGSPSLQFRLMGPKLQVNTTPVVIGKRCVTGLRLHLEGKKCNRLAIHLQYLTVVPQILQQLWEDDQPEDWEGPDDDFSKYFEPVMWKSFSHVCTAPVESTETWEDEGKVEPGQKGALVVTGAQLDVEQYGSKKVLFLRLLYSKIHKARIRRSEWDHTPASQQKSGIFSTLEDSEVRVGSHTGVTAEIRHLQHSYEHYLLFSADSSTEASASGCQLCHIPPGPATCQKPGTQALEVCRHDRNDKGAS

SEQ ID NO: 468 - protein, 258 aa, Platycerium hillii
MAKRRFCSEGQKDASAVKNLAMDGVFITLYSVELPRSQLILKEEVKAAVPSSWDPAALASFLEKYGTHIIVGVKIGGKDVICLKQHRSSSLSAVGVQKILEAKGKERFSSVEGSTSKEKINKGKIRDGSSFGSNGMNALNGSKDLPWMSDSSTDYSTVETEDVTVIFKRKGGRDRSQSHDEWLHTVPLFPDVVSMSFVPITSLLNGITGTGFLNHAINHYLRYKAPIQELHHFLEFQLPKEWAPAYGDLPLGPPRKQA

SEQ ID NO: 469 - protein, 369 aa, Lygodium flexuosum
MENSESFSLMEDSSTFSIDGDVTVIYKRKGGSESCQSHNDWLHTVPLAPDVVSMSFVPITTLLNGVPGTGFLSHAINLYLRYKPPLQELSNFLEFQLPKEWAPAFGDLPLGPPRKQQEVPSLQFRLMGPKLHINTTPVVVGKRPVTGLRLYLEGKKSNKLAIHLQYLTAVPQILKTLWVEDGGGEEEWVGPEADFSKYLEPVQWRNFSHVCTAPVENSETWLGGPGGALVVVGARLQVQQYGAKKVLFLHLLYSRIAKARIRRSEWDHMPASQQKSGLFSTLISTTFSSAAAQSPAPPKPVVINSAIYPEGPPVPGQMPKLLKFVDTTEMTRGPHDLPGHWLVTGAKLLLERGKISLRAKYSLLLYSVE

SEQ ID NO: 470 - protein, 608 aa, Polystichum polyblepharum (LW12418)
MAFKHDIPNAAKVANIAIQSLGRGYDLTCDLRFSTCKDVNGTPLIELRNNETLELSLPGGVVVANVPSIVKCDKGERTRFRSDILTFDQMSQQFNQGLSLSGKIPCGLFNYMFNFTGSWQKDASTTRHLALDGWFYTLYTVEIPRSHLVLKEDIKASVPTSWEPAALARFIETFGTHLIVGIKIGGKDVVYMKQHQSSPSTSVDFQKLLAEVSDERFLQTEGRASVGSKDSRSNKKRSIEFQSWSAHLDTFSQIIHNDKHHVTIIPRRKGGFDHGQSHSEWIHTVPLAPDVISVSLIPITFLLNGVAGSGFLSHAVNLYLRYKPPIEELRQFFEFQLPREWAPVFNELPLTLPRREHSPSTLQFTLMGPKLKVSKLQVTVGKKPVTGMRLFLEGKRCDKLAIHLQHLSAIPRFLRPLWEDHPFAREVTWQDPDDYSTKYFEPVQWKNFSHVCTAPVENTETWIGDHAGASVVVGAQLAVKSFGLRNVLYLRLLYSKIPEAKIRRSEWDHMPASTQKSGMFSSFLSTTFSSTPFPTKGPAVVINSGIYPEGPPKPVRDPKLLKFVDTTEMTKGPQDMPGHWLVTGAKLYLDKRKISLRVKYSLLTVRSD

SEQ ID NO: 471 - protein, 395 aa, Tupidanthus calyptratus
MFSDGRNPVLERKTRDGKQKVPEVFNRMLQSHTMQFSSITETSSKDGLTILSSKRGGDVFSQNHSNWLQTVASNPEAICFKLVPITSLLTGVPGSGYLSHAINLYLRYKPAPEDLRYFLEFQVPVQWAPLFCELPLRHQRRKASCPLLQFAFLGPKIHVSSTQVTSGEKPVVGLRLFLEGKKCNRMAIHAQHLSSLPNIMEFALSNSATSRPCQWRGSDDYISNDQFLEPVRWKRYSNVCSSVVEHDSNWIQGEEVGAFVVTGAQLISKGKWPKTILHLRLLFSYLPNCTIRKTEWAAAPEASQKSGFRLNLSTTFTFSQRTGADAPKQLPAALNSGVYPEGPPVPLRSKKLLKYVDVAEVVRGPHDTPGHWLVTAAKLVTDGGKIGLHVKFALL

SEQ ID NO: 472 - protein, 374 aa, Tupidanthus calyptratus
MEEEGGKPIEVIAMESLGLGFDFASDFKLKFAKRCPDGAGDDGRLVVIDEANKRDVVFPGGGVIRGVPESIRCGKGDRIRFKSDVLKFNQMSELINQKSSVQGKVPSGYFNAMFDLSGSWFNDAADSNHLAFDGYFISLYYLHLIASPLVLRDKVKNSVPSHWNPASLSRFILTYGTHVIVGLAVGGRDLICVKQRQSSGIPPAELRGYLEDLGDCLFSDGKSPLLERKARDGKQNVPEVFTRMLQSNTKHFTSITETSSKDGLTIILSKRGGDVFSQNHSNWLQTVASNPEAICFKLVPITSLLTGVPGSGYLSHAINLYLRYKPIPEDLQYFLEFQVPRQWAPLFCEMPLGHTEQRLLVLRCNSLSWVPRFM

SEQ ID NO: 473 - protein, 264 aa, Asplenium prolongatum x Asplenium antiquum (Kurata)
MSSTAFSIAQQAVDALGRGYNVNFDVSLSYGKQGKRLIEIDESGPTQDLLLPGNIIIPNMPASIKCDKGERTRFTTEFLTFNEMSELFNQNLAISGKIPTGHFNTMFDFSGSWQKDASQVKTLALDGFFINLYTVELPRAQLTLKEEVRAAVPSSWDPAALASFVKKYGTHVIVGVKIGGKDVVCLKQHRTSQLSTVRVQKILEEKAKERFTSIAGGTSKEKINKGKDVRVMFKRKGGKDVSQSHEEWLHTVPAAPDIVSMSFV

SEQ ID NO: 474 - protein, 314 aa, Tupidanthus calyptratus
MEGGEETVKPIGLRAMESLGLGFDFASDFRLKFAKRCPGAGGDDRLVVLDEASRRDVVFPGGGVIRGVPECIRCDKGDRIRFKSDVLKFNQMSELVNQKSSVQGKVPSGYFNAMFDLSGSWLNDAADANHLAFDGYFISLYYLHLIASPLVLRDKVKNSVPSHWNPASLSRFILTYGTHIIVGLAVGGQDVICVKQRPSSGIPPAELRGYLEDLGDCMFSDGRNPVLERKTRDGKQKVPEVFNRMLQSHTMQFSSITETSSKDGLTILSSKRGGDVFSQNHSNWLQTVASNPEAICFKLVPITSLLTGVPVSTL

SEQ ID NO: 475 - protein, 679 aa, Blechnum brasiliense
MASAVGGLAAMQAQSSEGAPLQNTASLAFSVAQQAVDALGRGYDVNSDLWLRYCKRGERLIENDNSGPTQDLLLPGNIIIPNVSTSIKCDKGDRMRFTSDVLTFSEMSEQFNQNLSISGKIPVGHFNAMFGFSGSWQKDASQVKTLAMDGVFINLYSVELPRAQLTLKEEVRAAVPSSWDPAALASFLEKYGTHVIVGVKIGGKDMICLKQHRSSTLPAVGVQKILEAKAKERFSSVEGSAAKEKINKGKIRDGSAHEANGMNAVFGSKDGMPLSWMNDTAPDLENDDVTVICKRKGGKDISQSHDEWLDTVPSTPDIVSMSFVPITSLLNGVTGTGFLTHAINHYLRYKPPIQELHHFLEFQLPKEWAPAFGDLPLGPPRKQQGSPSLQFRLMGPKLQVNTTPVVIGKRCVTGLRLHLEGKKSNRLALHLQYLTVVPQILQRLWEDDQAEEWEGPDDDFGKYFEPVMWKSFSHVCTAPVESRLWEDDQTEEWEGPDDDFGKYFEPVMWKSFSHVCTAPVESNEIWVDEAKGEHGPKGALVVTGAQLDVEQHGSKKVLFLRLLYSKIHKAKIRRSEWDHTPASQQKSGIFSSLMSTTFTAQAAPVKPAHVDINSAIYPQGPPPAKSQAPKLLKYVDTTEMTRGPLDLPGHWLVTGAKLFVDRGKIAVRAKYSLLLYSVD

SEQ ID NO: 476 - protein, 556 aa, Schizophragma hydrangeoides
MVPGFGSFKHVSIDIKCDKGDRTRYQSDRTRYQSDILDFNQMSEFINQKCSIPGKIPSGLFNAMFGFQSGSWVVDAANTKYLGLDGYFIIVFNVHIDRYPLILSDEVRNAVPSTWDPSALARFIEKYGTHIIVGLSMGGQDVVLVRQERSSNLEPSQLKNHLENLGDQLFTGACTFSPNHCKTKELSNKAPQAFNIFGSKMLFNSFSCISAKDGIIVICSKRGGDSSANSHCEWLPTVASMPDAIQFSFIPITSLLKGVPGKGFLSHAINLYLRYKPPLADLPYFLDFQAHKMWAPTHNDLPLGPTTNRAISTPALHFNFMGPKLYVNTSQVTVGKTAVTGMRFYLEGMKCNRLAIHLEHLSTTPILLQNKIDDQKTWRGSEELADCRYFEPIQWKNFSHICTSPVKYDPKWATRKDVAFIVTGAQLQVKKHDSKSVLHLRLLFSKVSNFNVVQSTWVQCSYENSQKSGFFSSISTSITGNVEREKKPTVVVDSSVYPTGPPMSVQTQKLLKFVDLSQLCRGPVDSPGHWLVTGARLELERGKICLNVKFSLLNMC

SEQ ID NO: 477 - protein, 608 aa, Waldsteinia ternata
MALPAYRMDPQAAAEKAVAAIGSGYDLCLDLRLTSCKSGLVDLDPTRTRDLVLPGGAVVSDVSTSIKCDKGERTKFRSDVVSFNQMSEQYNKELSLSGKIPSGLFNAMFNYSGCWQKDAAPTKYLAFDGWLITLYSIELARSQLRLSEQVKRDVPSLWDPAALAAFIEKYGTHIIVGVKMGGKDIVHIKQLQNSKLEPAELQRRLKQVAEERFSDDANETSASNPTADLFGMMKDDNPLHWDIQRTLASSIKPPIVTHSMDDDVVTISVRRGGVDIGQSHNQWLSTISQAPNVISMSFVPITSLLGGTQGNGFLIHAVNLYLRYKPPIEELQQFLEFQLPRQWAPVYADLPLGLKRRRHASPSLQFSFMGPKLYVNTVKVDSVNRPVTGIRLYLEGKKGDHLAIHLQHLTSLPSSLQVSTDHSYEPIDEPEERGYFEPVKWSIFSHVCTAPVQHNGGCINDSASIVTKAWFEVKTMGMRKVLFLRLGFSAVASARLRRSEWEGSSSSRKSGFISTLISTRFSSALNPPVAPAKVDLNSAVYPGGPPLPSKAPKMATFVDTMERLRGPEDTPGYWVVTGAKLCVEGGRISVRVKYSLLTIMSEDSMMFL

SEQ ID NO: 478 - protein, 618 aa, Tupidanthus calyptratus
MEEEGGKPIEVIAMESLGLGFDFASDFKLKFAKRCPDGAGDDGRLVVIDEANKRDVVFPGGGVIRGVPESIRCGKGDRIRFKSDVLKFNQMSELINQKSSVQGKVPSGYFNAMFDLSGSWFNDAADSNHLAFDGYFISLYYLHLIASPLVLRDKVKNSVPSHWNPASLSRFIQTYGTHVIVGLAVGGRDLICVKQRQSSGIPPAELRGYLEDLGDCLFSDGKSPLLERKARDGKQNVPEVFTRMLQSNTKHFTSITETSSKDGLTIILSKRGGDVFSQNHSNWLQTVASNPEAICFKLVPITSLLTGVPGSGYLSHAINLYLRYKPIPEDLQYFLEFQVPRQWAPLFCEMPLGHQRRKASCPLLQFAFLGPKIHVSSTQVTSGEKPVVGLRLFLEGKKCNHLAIHVQHLSSLPNIMAFACANSTISKPSQWRGSDDYESSDQFLEPVRWKRYSNVCSSVVKHDPNWIQGEEPGGAFIVTGAQLISKGKWPKTVLHLYLLFTYLPNCTIRKTEWAAAPETSRRSGFLTNLSTTFTFTQRDVADAPKQLPAALNSAIYPDGPPVPLSSGKLLKYVDVSEVVRGPHDTPGHWLVTAAKLVTDGGKIGLHVKFALLDYLPEP

SEQ ID NO: 479 - protein, 371 aa, Tupidanthus calyptratus
MEEEGGKPIEVIAMESLGLGFDFASDFKLKFAKRCPDGAGDDGRLVVIDEANKRDVVFPGGGVIRGVPESIRCGKGDRIRFKSDVLKFNQMSELINQKSSVQGKVPSGYFNAMFDLSGSWFNDAADSNHLAFDGYFITLYCLHLTASPLVLRDKVKKSVPSHWNPASLSRFILTYGTHIIVGLAVGGQDVICVKQRPSSGIPPAELRGYLEDLGDCMFSDGRNPVLERKTRDGKQKVPEVFNRMLQSHTMQFSSITETSSKDGLTILSSKRGGDVFSQNHSNWLQTVASNPEAICFKLVPITSLLTGVPGSGYLSHAINLYLRYKPAPEDLRYFLEFQVPVQWAPLFCELPLRHQRRKASCPLLQFAFLGP

SEQ ID NO: 480 - protein, 390 aa, Platycerium bifurcatum
MASKLDIPNAAKVAHLAIQSLGRGYDLTCDLRFSSFKDRNGTSLIQLRNDETIKLSLPGGVIVADVPAIVKCDKGERTRFQSDILSFDQMCQQFNQGLSLSGKVPCGLFNNMFNFSGSWQKDASTTKHLALDGWFYTLYTVEMPRSKLVLKENIKSLVPTSWEPAALARFIETFGTHIIVGVKIGGKDVVYMRQHQSSPSTPIEFQKLLTEVSNERFLQTEGRASMGSKDSRSHKKRNIEFQSWSAHLDTFSQMIYNEKHHITIIPRRKGGFDHGQSHSEWIHTVPLTPDVISVSLIPITFLLHGVAGSGFLSHAVNLYLRYNPPIEELRQFLEFQLPRVWAPVYGELPLTLPRREPSLPTLQFSLMGPKLKVSKLEICASFFTKVEDGH

SEQ ID NO: 481 - protein, 630 aa, Platycerium bifurcatum
MASAKEAAALAAVEALGCGFDLTSDYRLKYKKGSLLELQHSHNKDLTIPGCITIPDVSRGIKCDKGEHMRFTSEVMQFQQMSQWFNQNASVEGKIPLGLFNAMFDLSGSWQDDANRLKNLAFDGCFITLYKLHLTRSNLVLREEVKNDIPSVWDPKSLAKFIEKYGTHIIVSASVGGQDVLYLKENYSSLISAQEIRKKLKSAGDEYFSETSGKRNADFKHSETSPLNSQPFRGTIAKSAGDEYFSETSGKRNADFKHSETSPLNSQPFRGTIAGSAQLLISNKDYTLISQRRGGYYFAKTHCEWQETVNMYPEAISLSFIPITSLLLGAVGSGFLQHAINLYLRYKPPVSDLQYFLDFQVPRQWIPVHNELPLRLARKQAFSPSLQFSLMSPKLYIDNNEVVVSRKPVTGIRLYLEGRKNNRLAIHLQHLSVLPQSLGKFWSEGIQIEAPLWNGSSDAPNEWFEPVEWKCFSHVCTQPIKYKPEWSNEQGSAFVVTGAQLGVKAHGLKSVLHLHLLFSKIPGCSIQRSRWDQHPAAEKTGFFSSISTTFSTTTKAGKKGPPVVVDSAVYMGGPPRPIQSPKLLKFVDTAELTKGPQDAPGHWVVTAARLELDRGKIAIKVKFSLLNYAE

SEQ ID NO: 482 - protein, 602 aa, Equisetum
MDQTRAKESIQALGCGYDVLDDLRLNRYKGDSKYRLIELDESQTQDLVIQGGITIPGVPKAITCEKGERTRFRTDVLPFQQMSEQVNQWMSIPGKIPLGLFNGMFGLSGHWQKDALSVKNLAIDGWLITFYSVELPKSQLVLREEVKKEVPSSWDPQGLASFIEKYGTHIIIGVKIGGKDVLCMKQHQSSSLSTIEIQALLKKKADERFANTEYGDDALSTEQKFDGEKNSAMNQSNQFQLYTATTVLYSSQDNATILCSRRGGNDVGQSHNQWLQTVPGSPDVVLMSFVPITSLLNGVAGSGFLSHAINLYLRHKPPIEELMHFLEFQLPRQWAPAFSDLPLGPPKKGQSTSLLRFSLIGPRLYVNTTPVSVGRRPVTGLRLYLEGRRCNRLAIHVQHVSSVPRVLQPFWEDHPFAGEPKWQGPEDPDERYSEPVFWRSFSHVCTAPVENADVWGGDSASGAHVVVGARLVVKKWGALRNVLYLDLLYSKIPQAKIRRSEWDHTPAASQKSGFFSTLMSGNFSNVLMPPPTKPPPLNLNSGIYPEGPPVPVRRPKLLKFVDTTEYTKGPQDMPGHWLVTGAKLYLDRGKISLRVKYSLLIC

SEQ ID NO: 483 - protein, 664 aa, Tupidanthus calyptratus
MAFNANRFDPQSAAEKAVSAIGSGYDLTVDIRLSECKPGPSGSGLIELDRTLTKDLNLPCGRVVRNVSPSIKCGKGEQTRFHSDVLTFVQMSEQFNQDISLSGKIPSGLFNAMFDFKGCWQKDAATTKSLAFDGWFFSMYNIELARSQITLSEQVKKEVPSSWDPAALAEFIEKYGTHIVVGVKMGGKDVIHLKQLQNSNLQPTEVQKLLKQLADERFSEDVNGSLIPNPEKSSGKQKEEPSIVQDLNLPFANLLRQAVVSQSKNDDLLSIRIRRGGFDTGQSHKQWLSTVSQFPNAISMSFVPLASLLSGIRGSGFLSHAINLYLRYKPPMEELEQFLEFQVPRQWAPVYGDLPLAPRRKKQASPSLKFTFMGPRLYVNTIRVDSENRPVTGIRLYLEGKKSDHLAIHLQHLSTLPKILQLSEDLSYEPIDEPAEKGYLEAVKWSIFLEGKKSDHLAIHLQHLSTPPKRLQLSDDLSYEPIDEPAEKGYLEAVKWSMFSHICTQPVQYNGARIDDSASIVTKAWFEVKGIGMKKVLFLRLGFSTVASAVIRRSEWDGPTMSTRKSGLMSMLISTRFSTGLTEKPELRKKLDLNSAIYPEGPPLPTRAPKMLSFVDTKETVRGPEVPPGYWVVTGAKLCVEGGRIRVKVKYSLLTIMSEDSLFI

SEQ ID NO: 484 - protein, 638 aa, Asplenium australasicum
MASTVGGLAAMQAQSSEAAQPPNMSFTAFSIAQQAVDALGRGYNVNLDLSLSYCKQGKRLIEIDESGPTQDLLLPGNIIIPNMPASIKCDKGDRTRFTTEVLKFNEMSEQFNQNLSISGKIPTGHFNTMFNFSGSWQKDASQVKTLALDGFFINLYTVELPRAQLTLKEEVRAAVPSSWDPAALASFVEKYGTHVIVGVKIGGKDVVCLKQHHTSQLSTIRVQKILEEKAKERFTPIAGGTSKEKINKGKIRDGSPYGSNAMNGSKDGLSLSWMNDSLSDLLTVETDDVRVMFKRKGGKDVSQSHEEWLHTVPAAPDIVSMSFVPITSLLSGVMGTGFLSHAINHFLRYKPSIAELHHFLEFQLPKEWAPAFGDLPLGPPRKQQASPSLQFRLMGPKLQVNTMPVVVGKRCVTGIRLHLEGKKSNRLAIHLQYLTAVPQILQGLWEDHRPDNWEGPDTDFSRYFEPVMWRSFSHVCTAPVESKEPWVDEMKGEPVLKGALVVTGAQLDVQQHGSKKVLFLRLLYSKIRKVRIRRSEWDHTPASQQRSGIFSTLISTHFSSAPSPLSKPVQVNSAIYPDGPPLANSQAPKLLKFVDTSEMTRGPLDLPGHWLVTGAKLCVERGKIAVRAKYSLLLYGAD

SEQ ID NO: 485 - protein, 606 aa, Rumohra adiantiformis
MASKLANAAKVANNAIQSLGQGFDLTCDLRFSTCKDVDGKSLIELRNNETFELSLPGGVVVANVPAIVKCDKGGRTRFRSDILSFDQMSQQFNQGLSLSGKIPCGLFNYMFNFTGSWQKDASTTRYLALDGWFYTLYTVEMPRSQLVLKEDIKASVPTSWEPAALARFIETFGTHIIVGVKIGGKDVVYMKQHQSTPSTSVDFQKLLAEVSDERFLQTEGRASVGSKDSRGNKKRSIEFQSLSDHLATFSQIIYNEKHHVTIIPRRKGGFDHGQSHSEWIQTVPLAPDVISMSLIPITFLLNGVAGSGFLSHAINLYLRYKPPIEELRQFLEFQFPREWAPVFSELPLTLSRREHSPSTLQFTLMGPKLKVSKLQVTIGKKPVTGMRLFLEGKRCDKLAIHLQHLSAIPRFLQALWEDHPFAREFTWQDPDDYSTKYFEPVQWKNFSHVCTAPVENTETWIGDHAGASVVVGAQLAVKSFGLRNVLYLRLLYSKIPEAKIRRSEWDHMPACTQKSGMFSSFLSSTFSATPAPTKVSAVVINSGIYPEGPPRPVRGPKLSKFVDTTEMTKGPQDMPGHWLVTGAKLYLDKRKISLRVKYSLLTVVAD

SEQ ID NO: 486 - protein, 253 aa, Doellingeria umbellata
MSDKLVQKAIDSLGKGFDLTSDFRLKYCKGNERLIVLNDYESELLVPGFGSFKGVSPDIKCDKGDRVRFQSDILDFNQMSEFFNKKCSVPGKIPNGFFNAMFGLQSGSWASDVANTKYLGLDGYFIVLFNVHLDRYPLILSDEVRNAVPSTWDPPALARFIEKYGTHIIVGMSIGGQDVILMKQSKSSHLEPSQLKKHLEDLGDQLFNGSCTFSPHQLKTKTPSAFSTMFDPDPMTFNGFSSTTPKDVGLIIM

SEQ ID NO: 487 - protein, 376 aa, Symphoricarpos x chenaultii (Hancock)
MGSSKETAKRLKALAEVAIESIGLGYDVAEDLRIKYCKDKSTRLITIDDDQVRDIVIPGGILIPNVSKSIKCDKGERMRFSSDVLSFQQMSEQFNQEVSLSGKIPTGHFNAAFEFTGSWQKDAANTKALAFDGVFITIYSIALEKTQIALCDHIKQAVPSSWDPPALARFIEKFGTHVVVGVKMGGKDSIYVKQQHSSPLQPDEVQKRLKDVADKRFSDAGGQNNTNDRFGNNELGLTFMDSTTSSSYLHKEDITLFWRRRGGSTSKNLDHNKWCQSVQLEPDVISMSFIPISSLLSGVHGSGFLSHAINLYLRYKPPIEELHQFLEFQLPRQWAPVFGELAVGPERKQQNGASLQFSFMGPKLYVNSNLVILLCC

SEQ ID NO: 488 - protein, 610 aa, Asplenium antiquum (makino)
MASKHDIPNAARVANLAFQSLGRGFDLTCDLRFSSCKDVHGAPLIELSDKDLRKVSLPGGVVVPNVPTIVKCDKGEQTHFRSDILTFDQMSQEFNHGLSLSGKVPSGFFNYMFNFTGSWQKDASATRHLALDGWFYTLYTLEMPRSQLVLKEDIKAAIPTSWEPAALARFIETFGTHIIIGAKIGGKDVVYLKQHQVSTSTLADFQKLLAEVSEERFSQTEGRASVGSKDSHSNNKRSMQFKSWTAPLDSFSQIIYNDKHHVTIIPRRKGGFDHGQSHSDWVHTVPLAPDVISVSLVPITSLLNGVPGSGFLSHAVNLYLRYKPPTEELRQFLEFQLPREWAPVFSELPLTLCRREQSPSTLQFTLMGPKLKVNKSQVTIGRRPVTGMRLFLEGKRCDRLSIHLQHLSAMPNFLTSFWEDHPFAREATWQDPDDYSTKYFEPLQWKNFSHICTAPVENTETWIGDHAGASVVVGAQLAVKSYKLRNVLYLRLLYSKIPEAKIRRSEWDHVPALAQKSGMFSSFFSTTFSSTAVTGAAKAPAVVINSGVYPEGPPKPVQDPKLLKFVDTTEMTKGPQDMPGHWLVTGAKLYLDRRKISLRVKYSLLTVSLD

SEQ ID NO: 489 - protein, 640 aa, Asplenium antiquum (Crissie)
MASAVAGLAAMQAQSSEAAQPPKMSSTAFSIAQQAVDALGRGYNVNFDLSLSYCKQGKRLIDIDESGPTQDLLLPGNIIIPNMPASIKCDKGDRTRFTTEVLKFNEMSEQFNQNLSILGKIPTGHFNTMFDFSGSWQKDASQVKTLAMDGFFINLYTVELPRAQLSLKEEVRAAVPSSWDPAALASFVKKYGTHVIVGVKIGGKDMVCLKQQRTSQLSTVRVQKILEEKAKERFTSIAGGTSKENNKGKIRDGFSYGSNAMNAVNGSKDGLPLSWMNNSLSDLLTVETADVRVMFKRKGGKAVSQSHEEWLHTVPAAPDIVSMSFVPITSLLNGVMGTGFLSHAINHFLRYKPSIAELHHFLEFQLPKEWAPAFGDLPLGPPRKQQASPSLQFRLMGPKLQVNTMPVVVGKSCVTGIRLHLEGKKSNRLAIHLQYLTVVPQILQSRWEDDQLEDWEGPDTDFSKYFEPVMWRSFSHVCTAPVESKEPWVDEMKGEPALKGALVVTGAQLDVEQHGSKKVLFLRLLYSKIHKVRIRRSEWDHTPASQQRSGIFSTLISTHFSSAPSSPSKPVQVNSAIYPDGPPLANSQAPKLLKFVDTSAMTRGPLDLPGHWLVTGAKLDVERGKIAVRAKYSLLLYGAD

SEQ ID NO: 490 - protein, 493 aa, Aglaomorpha (Roberts)
MASKLDIPNAATVAHLAIQSLGRGYDLTCDLRFSSFKDVNGASLIELRDSETIELSLPGGVVVANVPAIVKCDKGERTRFRSDILAFEQMSQQFNQGLSLSGKIPCGLFNNMFNFTGSWQKNSSNTKHLALDGWFYTLYNMEMPRSQLVLKEDIKASVPSSWEPVALARFIETFGTHIVVGVKVGGKDVVYMKQHQSSPSTSIEFQKLLAEVSDERFLRSEGRASVGSKDSRSNKKHNIEFQPWSAHLDTFSQMSYNEKHHVTIIPRRKGGFDHGQSHSEWIHTVPLAPDIISVSLIPITFLLHGVAGSGFLSHASNLYLRYKPPIEELRQFLEFQLPREWAPVYSELPLTLPRREPSLSTLQFTFMGPKLKVSKLEVAVGKKPVTGMRLFLEGKRCDKLAIHLQHLSAIPRFLQPLWEDHPFSREVTWQDPDDYSTKYFEPVQWKNFSHVCTAPVENTETWIGDHAGASVVVGAQLGVKSFGLRNVLYLRLL

SEQ ID NO: 491 - protein, 665 aa, Vernonia noveboracensis
MALKLPAAEAANVAIQSIGCGYDISLDLRLKYRKGEFISDVGNNQNRNCRLIEIDEDEGRDIVLPGGLLIPNVSKSIKCDKNQRTRFRSDVLSFQQMSEQFNQEISLTGKIPSGLFNAMFEYSGSWQKDASSTKTRFRSDVLSFQQMSEQFNQEISLTGKIPSGLFNAMFEYSGSWQKDASSTKTLAFDGVFISLYTVALEKSQMVLCDNVKKAVPSSWDPALLARFIEKFGTHIIVGVKMGGKDVIYMKQQHASSLQPADVQKRLKAMADKRFLDADGQYIIDAEHTSHNDKDDIRGQRLRFADADPSSSYSYKEDLVSIYKRRGGCDDRNLKHNEWLHGVQLEPDVITMSFIPITSLLNGVSGSGYLSHAINLYLRYKPPVEELHQFLEFQLPRQWAPVFSDLPLGPQRKQQTTPSLQFSFFGPKLYVNINPVDVGKRPVTGLRLYLEGKRSNRLAIHLQHLSSLPKVFQLEDDVDGNLAEESYDRRYYEKVQWKHFSHVCTAPVESDDELSIVTGAHLHVGDYGFKRILFLRLRFSTVVGAAAIKNPEWDGSPGLARKSGLISTLISHHFTAVLKSQPQAAEVNINSAIYPGGPPAPVQVPKLLKFVDTAEMTRGPQESPGYWVVSGARLVVDKGKISLRVKYSLLTVISADEEEEAAAAFY

SEQ ID NO: 492 - protein, 328 aa, Tupidanthus calyptratus
MAFNANRFDPQSAAEKAVSAIGSGYDLTVDIRLSECKPGPSGSGLIELDRTLTKDLNLPCGRVVRNVSPSIKCGKGEQTRFHSDVLTFVQMSEQFNQDISLSGKIPSGLFNAMFDFKGCWQKDAATTKSLAFDGWFFSMYNIELARSQITLSEQVKKEVPSSWDPAALAEFIEKYGTHIVVGVKMGGKDVIHLKQLQNSNLQPTEVQKLLKQLADERFSEDVNGSLIPNPEKSSGKQKEEPSIVQDLNLPFANLLRQAVVSQSKNDDLLSIRIRRGGFDTGQSHKQWLSTVSQFPNAISMSFVPLASLLSGIRGSGFLSHAINLYLRC

SEQ ID NO: 493 - protein, 340 aa, Tupidanthus calyptratus
MEEEGGKPIEVIAMESLGLGFDFASDFKLKFAKRCPDGAGDDGRLVVIDEANKRDVVFPGGGVIRGVPESIRCGKGDRIRFKSDVLKFNQMSELINQKSSVQGKVPSGYFNAMFDLSGSWFNDAADSNHLAFDGYFISLYYLHLIASPLVLRDKVKNSVPSHWNPASLSRFILTYGTHIIVGLAVGGQDVICVKQRPSSGIPPAELRGYLEDLGDCMFSDGRNPVLERKTRDGKQKVPEVFNRMLQSHTMQFSSITETSSKDGLTILSSKRGGDVFSQNHSNWLQTVASNPEAICFKLVPITSLLTGVPGSGYLSHAINLYLRYKPAPEDLRYFLEFQVP

SEQ ID NO: 494 - protein, 621 aa, Nephrolepis cordifolia (Duffii)
MASTKEAAALAAVKALGCGFDLTSDYRLKYKKGPLLHLQHSYTKDLTIPGGITIPDVVRDVKCDKGERIRFASEIMQFQQMSQFFNQNSSIEGKIPLGLFNAMFDLSGSWQDDANRIKNLAFDGCFITLYKLHLTRSNLVLQEEVKNDIPSVWDPQRLAKFIEKYGTHIIVSASIGGQDVLYLKENSSSLLSAQDLHKKLKSAGEEYFSDKGAKGNTSFKDSETSPLNALHSHQFRALAPSAQLFISNKDYTIISQRRGGYFFAKNHCEWQETVNSYPEAIQRRGGYFFAKNHCEWQETVNSYPEAISLSFVPITSLLLGIAGSGFLQHAINLYLRYKPPVSDLQYFLDFQVPRQWIPIHNELPLRLARKQVFSPSLQFSLTSPKLYVNNNEVVVNRKPVTGVRLYLEGRKSNKLAIHLQHLSVLPQSLGQFWSESTQMELPRWNGSNDAPNDWFEPVEWKCFSHVCTQPIKYKPEWLNERGGAFVVTGARLDVKAHGLKSILHLHLLFSKIPGCTIQRSRWNEHPAAEKAGFFSSISTTFSATTKTGKKGPPVVVDSAIFMEGPPRPIQSPKLLKFVDTTELTKGPQDAPGHWVITAARLELEKSKISLRAKFSLLNYTE

SEQ ID NO: 495 - protein, 629 aa, Pteris cretica (roweri)
MHPQSSEVATSQPHSRAFLVAQQAVDALGRGYDVTCDLWLSYCKNGELLIENDESSPTQDLFLPGNIAIPRVSTAVKCDKGDRTRFTTDVLTFNEMSEQFNQSLAISGKIPLGHFNGMFNLSGSWQRDASMVKTMAMDGVYINLYSVELSRTKLALKEEVKAAVPSSWDPAALASFVEKYGTHVIVGVKIGGKDVICIKQRSSSSLSAVGVQRILEAKSKERFSSIEGSMSKEKTDRGKIRDGSILGSNGINAAHKSGVPLPWIHDSSSDFSVETDEVTVTFKRKGGRDSSQSHDEWLQTVPSAPDIVSMSFVPITSLLNGITGTGFLSHAINLYLRYKPTIQELHHFLEFQLPKEWAPAYGDLPLGPPRKQQGSPSLQFRPLGPKLQVNTTPVVVGKRCVTGIRLHLEGKKGNRLAVHLQYLTVVPQILQRTWEDDQPEIWEGPDTDFLKYFEPVMWKSFSHVCTAPVESSEMWDDETKGEQGGPRAALVVTGARLDVEQHGSKKVLFLRLLYSKIHGASIRRSEWDDAPASQQKSGIFSTLMSTTFSTAQASPLKPVQVVVNSAIYQGPPPANSQAPKLLKFVDTTEMTRGPVDSPGHWLVTGAKLFVGNGKIAVRPKYSLLLYSME

SEQ ID NO: 496 - protein, 607 aa, Phormium (Lancer Terra Cotta)
MALKFPPRKAAEFAINSIGLGYDVAADIRLKYCKRETQDPCLIELDKDQLQDIVLPGGITVSNVPKSIKCDKGERTRFRSDVLSFQQMSEQFNQELSLSGKIPSGLFNYMFEFSNCWQKDAANTKSLAFDGWFITLYTVALAKSQIVLRDHVKQAVPSSWDPAALARFIEKFGTHVIVGVKMGGKDVIYVKQQHFSNLQPAEVQKILKDMADKRFLDVSGQYGMNSEEAFGKDKFDFKEQRLRFADSSSSSSYSTKEDIVRIFKRRGGNDNKDLPHPEWLNTVQYEPDVISMSFVPITSLLQGIPGSGFLSHAINLYLRYKPPTEELHQFLEFQLPRQWAPVFSDLPLGPQRKHQSTASLQFTFMGPKLYVNTSVVDVGKRPVTGLRLYLEGKRSNRLAIHLQHLSSLPRIFELREDPSSSYSRESHDRKYYEPIQWRHFSHVCTAPIEADEDNSIVTGAQLHVGHYGLKKVLFLRLHFSTVSNVTLVRNHEWDGSPGLAHKSGLISTLISTRFTAAIQKPPPRPADVYINSAVYPGGPPVPVQTPKLLKFIDTTEMVRGPQNPPGYWVVSGAKLQLERGKISLRVKYSLLTVLLPDDDDDDDDDDV

SEQ ID NO: 497 - protein, 390 aa, Tupidanthus calyptratus
MSSSTSTSSSSSSSGDGIVWRAINSLGKGFDLTSDFRLKYCKGNHPLVLLNQTHTKQLLVPGFGYFNHVSSDINCGKGERTRYQSDILDFNQMSEFMNQRSSVPGKIPSGLFNSMFGFESESWAKEAASTKCLGLDAYFISLFHLRINRYPLVLCDEVRNAVPSTWDPSALARFIEKYGTHIIVSLGIGGQDTVVVRQDKSSNLEASDLKKYLDQLGDQLFTGTCTFTPKQRNHKAPAAFNVFDHQSTLFDNFSSVKTKNGVNVICSKRGGDVSAHTHCEWLLTVPSMPDAIQFSFIPITSLLKGVPGNGFLTHAINLYLRYKPPLDDLQYFLDFQAYKIWGPVHSELTLGPATNRALGTPTLHFNLIGPKLYVNTTRVHTLNNSIPLNK

SEQ ID NO: 498 - protein, 664 aa, Asplenium australasicum
MASTVGGLAAMQAQSSEAAQPPNMSFTAFSIAQQAVDALGRGYNVNLDLSLSYCKQGKRLIEIDESGPTQDLLLPGNIIIPNMPASIKCDKGDRTRFTTEVLKFNEMSEQFNQNLSISGKIPTGHFNTMFNFSGSWQKDASQVKTLALDGFFINLYTVELPRAQLTLKEEVRAAVPTSWDPAALASFVKKYGTHVIVGVKIGGKDVVCLKQHHTSQLSTIRVQKILEEKAKERFTPIAGGTSKEKINKGKIRDGSPYGSNAMNGSKDGLSLSWMNDSLSDLLTVETDDVRVMFKRKGGKDVSQSHEEWLHTVPAAPDIVSMSFVPITSLLSGVMGTGFLSHAINHFLRYKPSIAELHHFLEFQLPKEWAPAYLRYKPPIDQLRHFLEFQLPKDWAPAFGDLPLGPPRKQQASPSLQFRLMGPKLQVNTMPVVVGKRCVTGIRLHLEGKKSNRLAIHLQYLTAVPQILQGLWEDHRPDNWEGPDTDFSRYFEPVMWRSFSHVCTAPVESKEPWVDEMKGEPVLKGALVVTGAQLDVQQHGSKKVLFLRLLYSKIRKVRIRRSEWDHTPASQQRSGIFSTLISTHFSSAPSPLSKPVQVNSAIYPDGPPLANSQAPKLLKFVDTSAMTRGPLDLPGHWLVTGAKLDVERGKIAVRAKYSLLLYGAD

SEQ ID NO: 499 - protein, 642 aa, Asplenium australasicum
MASTVGGLAAMQAQSSEAAQPPNMSFTAFSIAQQAVDALGRGYNVNLDLSLSYCKQGKRLIEIDESGPTQDLLLPGNIIIPNMPASIKCDKGDRTRFTTEVLKFNEMSEQFNQNLSISGKIPTGHFNTMFNFSGSWQKDASQVKTLALDGFFINLYTVELPRAQLTLKEEVRAAVPSSWDPAALASFVEKYGTHVIVGVKIGGKDVVCLKQHHTSQLSTIRVQKILEEKAKERFTPIAGGTSKEKINKGKIRDGSPYGSNAMNGSKDGLSLSWMNDSLSDLLTVETDDVRVMFKRKGGKDVSQSHEEWLHTVPAAPDIVSMSFVPITSLLSGVMGTGFLSHAINHFLRYKPSIAELHHFLEFQLPKEWAPAFGDLPLGPPRKQQASPSLQFRLMGPKLQVNTTPVVVGKRCVTGIRLHLEGKKSNRLAIHLQFLTVVPQILQSRWEDDQLEDWEGPDTDFSKYFEPVMWRSFSHVCTAPVESREPWAADEMAGEAALKGALVVTGAQLDVEQHGSKKVLFLRLLYSKIHKAMNRRSEWDHTPASSQRSGIFSTLISTPFSSAAASSPAAAKPVHVNSAIYPDGPPPANSQAPKLLKFVDTSEMTRGPLDLPGHWLVTGAKLCVERGKIAVRAKYSLLLYSED

SEQ ID NO: 500 - protein, 600 aa, Matteuccia struthiopteris
MASANDAVALAAVEALGCGFDLTSDYRLKYRKGPLLHLQHSYNKDLTIPGGITIPDVSRDVKCDKGERIRFASEVMQFQQMSQWFNQNASVEGKIPLGLFNAMFDLSGSWQDDANQLKNLAFDGYFITLYKLHLTRSHLVLREEVKNDIPSVWDPQSLAKFIEKYGTHIIVSASVGGQDVLYLKENYSSLLSTQDIHKKLKSAGDDYFSDRGGEKSANFKESETLPLNALSSQPFRATVAHIHSAQVLVTNKDFTIISQRRGGYHFAKTHCGWQETVNIFPEAISLSFVPITSLLVGVAGSGFLQHAINLYLRYKPPVSDIQYFLDFQVPRQWIPIHNELPLRLARKQTFSPSLQFSLTGPKLYINNNEVVVNRKPVTGIRLYLEGRKSNRLAIHLQHLSVLPQSLGQFWNEGTELESPWWNGSNDAPKEWFEPVEWKCFSHVCTQPIKYKPEWLNERGSAFVVTGARLEVKAHGLKNVLHLHLLFSKIPGCTIQRSRWGQHPAAEKTGFFSSISTTFSSTTKAGKKGPPVVVDSAVFIGGPPRPIQSPKLLKFVDTTELTKGPQDAPGHWVVTAARLELDRGKISVSVKFSLLNYADAE

SEQ ID NO: 501 - protein, 603 aa, Platycerium bifurcatum
MASKLDIPNAAKVAHLAIQSLGRGYDLTCDLRFSSFKDRNGTSLIQLRNDETIKLSLPGGVIVADVPAIVKCDKGERTRFQSDILSFDQMCQQFNQGLSLSGKVPCGLFNNMFNFSGSWQKDASTTKHLALDGWFYTLYTVEMPRSKLVLKENIKSLVPTSWEPAALARFIETFGTHIIVGVKIGGKDVVYMRQHQSSPSTPIEFQKLLTEVSNERFLQTEGRASMGSKDSRSHKKRNIEFQSWSAHLDTFSQMIYNEKHHITIIPRRKGGFDHGQSHSEWIHTVPLTPDVISVSLIPITFLLHGVAGSGFLSHAVNLYLRYNPPIEELRQFLEFQLPRVWAPVYGELPLTLPRREPSLPTLQFSLMGPKLKVAVGKKPVTGLRLFLEGKRCNKLAIHLQHLSAIPKFLQPLWENHPFAREVTWQDPDDYSTKYFEPVQWKNFSHVCTAPVENTETWIGDHAGASVVVGAQLAVKSFGLRNVLYLRLLYSKIPEAKIRRSEWDHMPALTQKSGMFSSFLSTTFSSTPAPPKVPAVVINSGIYSEGPPNPVRDPKLLKFVDTTEMTKGPQDMPGHWLVTGAKLYLDKRKISLRVKYSLLTVNSD

SEQ ID NO: 502 - protein, 527 aa, Waldsteinia ternata
MRFGSDVLSFQQMSEQFNQELALSGKIPSGHFNTAFEFTGGWQKDAANTKTLAFDGVSITLYSVALEKSQVSLREQVKQDVPSSWDPTALARFISKYGTHVIVGVKMGGKDTIYAKQMYSSPVQPADVQKKLKDMADKMYVDGNSHSGVTSEKFHERDKFIKEQGLGIMNAIPSSSYASVESQDIKFVCKRKGGSLHKNLRHSEWSQTVQLEPDVISMSFVPITSLLSGIHGSGFLTHAINLYLRYKPPVEELHQFLDFQVPRQWAPVFGELALGPQRRQESTASLQFSFMGPKLYVNTNPVDASKKPVTGLRLYLEGKRSNCLAIHLQHLSSLPKTFQLQDQVKISHPSSDRRYYERVQWKSFSHVCTAPIEAGDDFSVVTGAQFQIGESGMKKVLFLQLHFSKVSNAINVRQAEWDGSPALTQKSGIMSTIISTRFSTAQKQPPNPANVDINSALYPGGPPVATQAPKLLRFVDTTEMTRGPQDSPGYWVVSGARLMVEKAKISLRVKYSLLTMILPDEEEMGDG

SEQ ID NO: 503 - protein, 618 aa, Tupidanthus calyptratus
MEEEGGKPIEVIAMESLGLGFDFASDFKLKFAKRCPDGAGDDGRLVVIDEANKRDVVFPGGGVIRGVPESIRCGKGDRIRFKSDVLKFNQMSELINQKSSVQGKVPSGYFNAMFDLSGSWFNDAADSNHLAFDGYFITLYCLHLTASPLVLRDKVKKSVPSHWNPASLSRFIQTYGTHVIVGLAVGGRDLICVKQRQSSGIPPAELRGYLEDLGDCLFSDGKSPLLERKARDGKQNVPEVFTRMLQSNTKHFTSITETSSKDGLTIILSKRGGDVFSQSHSKWLQTVASNPEAISFKLVPITSLLTGVRGSGYLSHAINLYLRYKPIPEDLQYFLEFQVPRQWAPLFCEMPLGHQRRKASCPPLQFSFMGPKTRISSTLVTSGQKPVVGLRLFLEGKKCNHLAIHVQHLSSLPNIMAFACANSTISKPSQWRGSDDYESSDQFLEPVRWKRYSNVCSSVVKHDPNWIQGEEPGGAFIVTGAQLISKGKWPKTVLHLYLLFTYLPNCTIRKTEWAAAPETSRRSGFLTNLSTTFTFTQRDVADAPKQLPAALNSAIYPDGPPVPLSSGKLLKYVDVSEVVRGPHDTPGHWLVTAAKLVTDGGKIGLHVKFALLDYLPGS

SEQ ID NO: 504 - protein, 347 aa, Vernonia noveboracensis
MSFYQTNFYDPQSAAEKAVSVIGYGYDLTSDIRLTGCKPGPTGSTLIELDRTLSKDLVVPGGVVVHDVSPAIKCDKGERTRFHSDVLSFNHMSEQFNQEVSLSGKIPSGFFNSMFGYKGCWQKDAATTKNLAFDGWFITLYNIELEKAQIVLSEKVKQQVPSLWDPTALAEFIDKYGTHIVVGVKMGGKDVIYLKQLHSSNLEPTEVQNLLKQLADDEWSEDVSASSVSGPDKLIKQKDARSVAWDIPVLGNSIRQPIVISRSKKDDLLSIHVRQGGIDHGQSHKSWLSTVSQSPNVISMSFVPIVALLGGVRGSGFLSHAINLYLRCEFADFLYGSEKCKVYSLKK

SEQ ID NO: 505 - protein, 291 aa, Tupidanthus calyptratus
MAFNANRFDPQSAAEKAVSAIGSGYDLTVDIRLSECKPGPSGSGLIELDRTLTKDLNLPCGRVVRNVSPSIKCGKGEQTRFHSDVLTFVQMSEQFNQDISLSGKIPSGLFNAMFDFKGCWQKDAATTKSLAFDGWFFSMYNIELARSQITLSEQVKKEVPSSWDPAALAEFIEKYGTHIVVGVKMGGKDVIHLKQLQNSNLQPTEVQKLLKQLADERFSEDVNGSLIPNPEKSSGKQKEEPSIVQDLNLPFANLLRQAVVSQSYQTLKNHLENRRRNHLLSRISICHLQTC

SEQ ID NO: 506 - protein, 601 aa, Tupidanthus calyptratus
MALKLPAPEAAKIAIQSIGCGYDICLDLRLKYRKRDSTNLSLIEIHEDQEKEIVLPGGILIPNVSKAIKCDKGEHARFRSDVLSFQQMSEQFNQEMSLTGKIPSGVFNTMFEFTGSWQKDAAHTKTLAFDGLFITLYTVALDKSQMVLSDHVKKAVPSSWDPAALARFIEKFGTHIIVGVKMGGKDVIYMKQQHSSSLQPSDVQKRLKTIADKRFVDARGQSGMDSEQTYQKDKFQVREQRLRFADTSLSSSYSYKEDIVSICMRRGGNDNKNLTHNEWLHNVQLEPDVISMSFIPITSLLNGVSGSGFLSHAINLYLRYKPPTEELHQFLAFQLPLHWAPVFSVHPLGLQPRQQSTASLQFSFMGPKLHVNTSPVDVGKRPVTGLRLYLEGKKSNRLAIHMQHLSSLPEFFQLEDDPNGNFRQESYDRRYYEKVQWKNFSHICTAPVESDEDLSIVTGAQLEVGDYGFKRVLFLRLRFSTVLGAVAVKHPEWDGSPGLARKSGLISTLISHHFTATLKPPPQPADVNINSAIYPGGPPAPTQSAKLLKFVDTTEMTRGPQETPGYWVVSGARLMVEKGRISLRVKYSLLTVMLPDEEALE

SEQ ID NO: 507 - protein, 312 aa, Tupidanthus calyptratus
MEEEGGKPIEVIAMESLGLGFDFASDFKLKFAKRCPDGAGDDGRLVVIDEANKRDVVFPGGGVIRGVPESIRCGKGDRIRFKSDVLKFNQMSELINQKSSVQGKVPSGYFNAMFDLSGSWFNDAADSNHLAFDGYFITLYCLHLTASPLVLRDKVKKSVPSHWNPASLSRFILTYGTHIIVGLAVGGQDVICVKQRPSSGIPPAELRGYLEDLGDCMFSDGRNPVLERKTRDGKQKVPEVFNRMLQSHTMQFSSITETSSKDGLTILSSKRGGDVFSQNHSNWLQTVASNPEAICFKLVPITSLLTGVPVKS

SEQ ID NO: 508 - protein, 640 aa, Lygodium flexuosum
MKPAAVTLRPNFYTSSSSSAPSDPASVAKQAVDALGRGYDVTGDLWLSKCREPLIVDLAESSPTQDLAIPGGISLPSVPAPIKCDKGDRTRFASDILSFSEMSEQFNKTLSIAGKIPLGLFNSMFGFTGLWQKDASSTKTLALDGVFINLYSVEVPRTHLNLREEVRKAVPSSWDPAALASFVDKYGTHVIVGVKIGGKDVIYVKQRHSSPLSAVSIQKILETKAVERFSSGETCTSKEKLTKGKDFQTKGIHGAEPNGQNGNLLRGHVDGMENSESFSLMEDSSTFSIDGDVTVIYKRKGGSESCQSHNDWLHTVPLAPDVVSMSFVPITTLLNGVPGTGFLSHAINLYLRYKPPLQELSNFLEFQLPKEWAPAFGDLPLGPPRKQQEVPSLQFRLMGPKLHINTTPVVVGKRPVTGLRLYLEGKKSNKLAIHLQYLTAVPQILKTLWVEDGGGEEEWVGPEEDFSKYFEPVQWRNFSHVCTAPVENSETWLGGPGGALVVVGARLQVQQYGAKKVLFLHLLYSRIAKARIRRSEWDHMPASQQKSGLFSTLISTTFSSAAAQSPAPPKPVVINSAIYPEGPPVPGQMPKLLKFVDTTEMTRGPHDLPGHWLVTGAKLLLERGKISLRAKYSLLLYSVE

SEQ ID NO: 509 - protein, 331 aa, Tupidanthus calyptratus
MAFNANRFDPQSAAEKAVSAIGSGYDLTVDIRLSECKPGPSGSGLIELDRTLTKDLNLPCGRVVRNVSPSIKCGKGEQTRFHSDVLTFVQMSEQFNQDISLSGKIPSGLFNAMFDFKGCWQKDAATTKSLAFDGWFFSMYNIELARSQITLSEQVKKEVPSSWDPAALAEFIEKYGTHIVVGVKMGGKDVIHLKQLQNSNLQPTEVQKLLKQLADERFSEDVNGSLIPNPEKSSGKQKEEPSIVQDLNLPFANLLRQAVVSQSKNDDLLSIRIRRGGFDTGQSHKQWLSTVSQFPNAISMSFVPLASLSGFQLSHSFLMPYQCPLCLLLHF

SEQ ID NO: 510 - protein, 536 aa, Tupidanthus calyptratus
MYPNKLIVIKVSGYDLAHGLSFQQMSEQFNQEVSLSSKIPTGHFNAAFQFTGCWQKDAANTKTLALDGVFITIYTIALEKSQITLCDHIKEAVPSSWDPAALARFIEKFGTHVIVGVKMGGKDIVYMKQQHSSPLQSDEVQKRLKHVADNRFSNASGHSTNPEKVYEREMLEINEPPQEFMDDSASSSYMDLEDITFFYRRRGGSNKKNLPHDKWCQSVQLEPDVISMSFIPISSLLSGINGNGFLTHAINLYLRYKPAIEELSQFLEFQHPRQWAPVFGELAVGPERKQQSGASLQFSFLGPKLYVNTTLVDAGKRPVTGLRLYLEGTKSNCLAIHLQHLSTLPKSFQLQDEATCNYGSNDQRYYEKVQSKSFSHVCTGPVESDEDHSIVTGAQFEVRNSGMKRVLFLRLHFSKVIGSTVFKQPEWDGSPIIAQKSGIISTLISSRFSANQKQPPRPSDFNINSAIYPSGPPVPAQATKLLRFVDTSEMTRGPQDRPGYWIVSGARLLVDRGKISLCVKYSLLAVILPEDEMSLQ

SEQ ID NO: 511 - protein, 381 aa, Doellingeria umbellata
MMEGIEVRALESLGLGFDIASDFRLKFAKRCPDGGGRLVEMDESSRDIVIPAAGASSVVVSGVSQDIRCDKGDRIRFKSDVLEFNKMSELLNQKSSIQGKVPSGYFNALFDLSGAWLNDISDAKYIAFDGYFISLYYLHLTTSPLVLQESVKKSVPTHWNPLLLARFIQTYGTHIIVGMAVGGQDIICVKQKPSSPIPPGELKRYMDDLGDSLFSDGRSPSLMERKTRDGKQKVPDVFTRMLQPHTVQFSNITETSSKDGLTVIECKRGGDVFSESHSKWLQTVGTNPEAMLFKFVPITSLLNGVPGSGYLSHAINLYLRYKPALEDLQCFLEFQVPRQWAPLFCELPLRHQRRKTSCPRLQFSFMGPKFYVSTTQWCYRN

SEQ ID NO: 512 - protein, 428 aa, Doellingeria umbellata
MMEGIEVRALESLGLGFDIASDFRLKFAKRCPDGGGRLVEMDESSRDIVIPAAGASSVVVSGVSQDIRCDKGDRIRFKSDVLEFNKMSELLNQKSSIQGKVPSGYFNALFDLSGAWLNDISDAKYIAFDGYFISLYYLHLTTSPLVLQESVKKSVPTHWNPLLLARFIQTYGTHIIVGMAVGGQDIICVKQKPSSPIPPGELKRYMDDLGDSLFSDGRSPSLMERKTRDGKQKVPDVFTRMLQPHTVQFSNITETSSKDGLTVIECKRGGDVFSESHSKWLQTVGTNPEAMLFKFVPITSLLNGVPGSGYLSHAINLYLRYKPALEDLQCFLEFQVPRQWAPLFCELPLRHQRRKTSCPRLQFSFMGPKIYVSTTQVLSDDKPVIGLRLFLDGKKSNRLAMHVQHLSSLPDTITRTYSKSTVNRRPSQ

SEQ ID NO: 513 - protein, 286 aa, Sphaeropteris cooperi
MGSEAAARKVALDAVQSLGRGFDVTADFRTKFCKKRLVHIVNDGLESLTLPGDITIDAPSVIKCDKGECTRHTSDLMQFQQMSQAFNKRALIDGKIPLGHFNAMYDFTGSWFEDAMQTKNLAFDGKFITLFQLQLTSSLLLRKEVKNAVPSAWEPAALARFISLYGTHIVVRVSVGGQDVLYLKENASSMMSSADVHKHLKNLGDQMFAEKGVQKIQDGNSLRGCSIAPVEIDGTNILYKSKISLRLRTSDVSLSFKSLGSGRLCTVTCLLALHRGQSHCHLCNSV

SEQ ID NO: 514 - protein, 640 aa, Thelypteris noveboracensis
MASAVGGLVSMQAQSSEAAPLQNMSSLAFSVAQQAVDALGRGYDVNADLWLRYCKRGERLIENDNSGPTQDLLLPGNIIIPSVPTSIKCDKGDRTRFTSDVLTFSEMSEQFNQNLSIAGKIPVGHFNAMFGFSGSWQKDASQVKTLAMDGVFINLYSVELPRAQITLKEEVRAAVPSSWDPAALASFVEKYGTHVIVGVKIGGKDVICLKQHRSSSLSAVGVQKILETKAKERFSSVEGSAAKEKINKGKIRDGFTYESNGMNAVNGSKDGMPLPWTSDSSTDLETDDVTVIFKRKGGKDISHSHDEWLHTVPSAPDIVSMSFVPITSLLNGVTGTGFLSHAINHYLRYKPPIQELHHFLEFQLPKEWAPAFGDLPLGPPRKQQGSPSLQFRLMGPKLQVNTTPVVIGKRCVTGLRLHLEGKKSNRLAIHLQYLTVVPQILQRLWEDDQPEEWEGPDEDFGKYFEPVMWKSFSHVCTAPVESNEAWVDEAKGEPGPKGALVVTGAQLDVEQHGSKKVLFLRLLYSKIHKATIRRSEWDHTPASQQKSGIFSTLMSTPFSSAQAAPLKPAQVVINSAIYPQGPPPAKSQAPKLLKFVDTTEMTRGPLDLPGHWLVTGAKLFVDRGKIAVRAKYSLLLYSVD

SEQ ID NO: 515 - protein, 428 aa, Phormium (Lancer Terra Cotta)
MGGKDAVSIKQLQESALQQTEVQNLLKNLADDAFSEDFNANILLGAAEISKRLKGIKLANQENNAAVLKSMNSSIVTHLKKDDIVSIHVRRGGINTKQSHNQWLSTISQAPNVISMSFVPITSLLTGVRGSGFLSHAVNLYLRYKPPIEELHHFLEFQLPRQWAPVFNEIPLGPQHRKRRRLPSLQFTLMGPRLHVNTDKVDSKNRPVTGIRLFLEGKRNDCLAIHLQHLSTRPNIFQLSNDSDHTSADDISLNQRDYYEPIKWALLSHICTAPVQYSGASIDDSASIVTKAWLEVKDIGMRKVLFLRLGFSNVVGMKIRRSEWDGLTNVTRKSGSISAMISSRFSTGMIPPQKPKVEINSAVFPGGPPVPIRVPKMSRFVDTTEMMRGPDDLPGYWLVTGAKLCVEGGGISLKVKYSLLVPKPEDEL

SEQ ID NO: 516 - protein, 401 aa, Lygodium flexuosum
MENSESFSLMEDSSTFSIDGDVTVIYKRKGGSESCQSHNDWLHTVPLAPDVVSMSFVPITTLLNGVPGTGFLSHAINLYLRCKLMLAVHDFAFPVCVNFANSSFDQVSSLWATDKPPLQELSNFLEFQLPKEWAPAFGDLPLGPPRKQQEVPSLQFRLMGPKLHINTTPVVVGKRPVTGLRLYLEGKKSNKLAIHLQYLTAVPQILKTLWVEDGGGEEEWVGPEADFSKYLEPVQWRNFSHVCTAPVENSETWLGGPGGALVVVGARLQVQQYGAKKVLFLHLLYSRIAKARIRRSEWDHMPASQQKSGLFSTLISTTFSSAAAQSPAPPKPVVINSAIYPEGPPVPGQMPKLLKFVDTTEMTRGPHDLPGHWLVTGAKLLLERGKISLRAKYSLLLYSVE

SEQ ID NO: 517 - protein, 629 aa, Aglaomorpha (Roberts)
MASAKDAAALAAVEALGCGFDLTSDYRLKYKKGSLLELQRSHNKDLTIPGGITIPDVSRDIKCDKGERMRFASEVMQFQQMSQWFNQNASIEGKIPLGLFNAMFDLSGSWQDDASRLKSLAFDGSFITLYKLHLTRSNLVLREDVKKDIPSVWDPKSLAKFIEKYGTHIIVSASVGGQDVLYLKENDSSLLSAQDIRKKLKSAGDDYFSENSGKRNADFKDSDSSLLSAQDIRKKLKSAGDDYFSENSGKRNTDFKDSETLPLNSQPFRGTIAASAQLLISNKDYTVLSQRRGGYYFAKTHCEWQETVNMYPEAISLSFVPITSLVLGAAGSGFLQHAINLYLRYKPPVSDLQYFLDFQVPRQWIPVHNELPLRLARKQAFSPSLQFSLMSPKLYINNNEVVVNKKPVTGIRLYLEGRKNNRLGIHLQHLSVLPQSLGQFWSEGTQIESPQWNGSNDAPNDWFEPVEWRCFSHVCTQPIKFKSEWLNERDSAFVVTGARLDVKAHGLKSVLHLHLLFSKIPGCTIQRSRWDQHLAAEKTGFFSSISTTFSTTTKAGKKSPQVVVDSAVFMGGPPRPIQSPKLLKFVDTAELIKGPQDAPGHWVVTAARLELDRGKIAIKVKFSLLNYAE

SEQ ID NO: 518 - protein, 479 aa, Matteuccia struthiopteris
MGGFTHCIQWKCQSRSQLVLKEDILASVPTSWEPAALARFIETFGTHIIVGAKIGGKDVVYMKQHQSSPSTSIDFQKLLAEVSDERFLQTESRASVGSKDSRSNKKRSVEFQSWSAHLDTFSQIIYNEKHHVTIIPRRKGGFDHGQSHSEWIHTVPLDPDVISVSLVPITVLLNGVSGSGFLSHAVNLYLRYKPHIEELRQFLEFQLPREWAPVFSELPLTLSRREHSPSTLQFTLMGPKLKVNKLQVTVGKKPVTGMRLFLEGKRCDKLAIHLQHLSAIPKFLQSLWEDHPFAREATWQDPDDYSTKYFEPVQWKNFSHICTAPVENTETWMGDHAGASVVVGAQLAVKSFGLRNVLYLRLLYSKIPEAKIRRSEWDHMPASTQKSGMFSNFLSTTFSSAPAAPAKVPAVVMNSGIYPEGPPTPVRDPKLLKFVDTTEMTKGPQDMPGHWLVTGAKLYLDKRKIALRVKYSLLTVSSD

SEQ ID NO: 519 - protein, 266 aa, Tupidanthus calyptratus
MEGGEETVKPIGLRAMESLGLGFDFASDFRLKFAKRCPGAGGDDRLVVLDEASRRDVVFPGGGVIRGVPECIRCDKGDRIRFKSDVLKFNQMSELVNQKSSVQGKVPSGYFNAMFDLSGSWLNDAADANHLAFDGYFISLYYLHLIASPLVLRDKVKNSVPSHWNPASLSRFILTYGTHIIVGLAVGGQDVICVKQRPSSGIPPAELRGYLEDLGDCMFSDGRNPVLERKTRDGKQKVPEVFNRMLQSHTMQFSSITETSSKDVRL

SEQ ID NO: 520 - protein, 552 aa, Adiantum pedatum
MAKRPMSEHFLEVLLLRMCTRFRSEILTFDQMSEHFNQGLSLSGKIPCGFFNNMFNFSGLWQKDASTTRHLALDGWFYTLYTVEIPRSQLVLKEDIKALVPASWEPVALARFIETFGTHIIVGAKIGGKDVIYMKQHQSSPATSVEFQKLLAQVSDERFLQNEGRTSVGSVDNRSHKKPTIEFQSWSAHLDTFSQIVYNDKHHVTIMPRRKGGVDHGQSHSEWIHTVPLSPDIISVSLVPITFLLSGVAGSGFLSHAVNLYLRYKPPVEELRQFLEFQLPREWAPVFSDLPLTLSRKEHSPSTLQFALLGPKLKVSKMQVTVGKKPVTGMRLYLEGKKCDKIAIHLQHLSAIPRFLQPLWEDHPFAGEATWQDPDDYSTKYFEPVQWKNFSHVCTAPVESTETWIGDHAGASVVIGAQLAVKSFGLKNVLYVRLLYSRIPEARIRRSEWDHMPATTQKSGMFSTLLSTTFSSTAAPALAKASPVVLNSGIYPDGPPKPVQDPKLLKFVDTTEMTKGPQDMPGHWLVTGAKLYLDKKRISMRAKYSLLTVGSD

SEQ ID NO: 521 - protein, 647 aa, Platycerium wandae
MASKLDIPNAAKVAHLAIQSLGRGYDLTCDLRFSSFKDRNGTSLIELRNDETVKLSLPGGVVIADVPAIMKCDKGERTRFQSDILTFEQMCQQFNQGLSLSGKVPCGLFNNVFNFTGSWQKDASTTKHLALDGWFYTLYTIEMPRSQLVLKENIKSSVPTYWEPAALARFIETFGTHIIVGVQIGGKDVVYMKQHQTSPSTPIEFQKLLTEVSNERFLQTEGRASIGSKDSRSNKKRNVEFQSWSAHLDTFSQMIYNEKHHVTIIPRRKGGFDHGQSHSEWIHTVPLAPDVISVSLIPITFLLHGVAGSGFLSHAVNLYLRYNPPIEELRQFLEFQLPRAWAPVYGELPLTLPRRESSLPTLQFRLMGPKLKVSKLEVAVGKKPVTGMRLFLEGKRCDKLAIHLQHLSAIPKFLQPLWENHPFGREVTWQDPDDYSTKYFEPLQHLSAIPKFLQPLWENHPFGREVTWQDPDDYSTKYFEPVQWKNFSHVCTAPVENTETWIGDHAGASVVVGAQLAVKSFGLRNVLYLRLLYSKIPEAKIRRSEWDHMPASTQKSGMFSSFLSTTFSTTPVPPKVPAVVINSGIYPEGPPRPVRDPKLLKFVDTTEMTKGPQDMPGHWLVTGAKLYLDKRKISLRVKYSLLTVSSD

SEQ ID NO: 522 - protein, 640 aa, Asplenium antiquum (Crissie)
MASAVAGLAAMQAQSSEAAQPPKMSSTAFSIAQQAVDALGRGYNVNFDLSLSYCKQGKRLIDIDESGPTQDLLLPGNIIIPNMPASIKCDKGDRTRFTTEVLKFNEMSEQFNQNLSILGKIPTGHFNTMFDFSGSWQKDASQVKTLAMDGFFINLYTVELPRAQLSLKEEVRAAVPSSWDPAALASFVKKYGTHVIVGVKIGGKDMVCLKQQRTSQLSTVRVQKILEEKAKERFTSIAGGTSKENNKGKIRDGFSYGSNAMNAVNGSKDGLPLSWMNNSLSDLLTVETADVRVMFKRKGGKAVSQSHEEWLHTVPAAPDIVSMSFVPITSLLNGVMGTGFLSHAINHFLRYKPSIAELHHFLEFQLPKEWAPAFGDLPLGPPRKQQASPSLQFRLMGPKLQVNTMPVVVGKSCVTGIRLHLEGKKSNRLAIHLQYLTAVPQILQGLWEDYQPESWEGPDTDFSKYFEPVMWRSFSHVCTAPVESKEPWVDEMKGEPALKGALVVTGAQLDVEQHGSKKVLFLRLLYSKIHKAMNRRSEWDHTPASSQRSGIFSTLMSTPFSSAASSPTKPVHVNSAIYPDGPPPANSQAPKLLKFVDTSAMTRGPLDLPGHWLVTGAKLDVERGKIAVRAKYSLLLYSED

SEQ ID NO: 523 - protein, 616 aa, Doellingeria umbellata
MMEGIEVRALESLGLGFDIASDFRLKFAKRCPDGGGRLVEMDESSRDIVIPAAGASSVVVSGVSQDIRCDKGDRIRFKSDVLEFNKMSELLNQKSSIQGKVPSGYFNALFDLSGAWLNDISDAKYIAFDGYFISLYYLHLTTSPLVLQESVKKSVPTHWNPLLLARFIQTYGTHIIVGMAVGGQDIICVKQKPSSPIPPGELKRYMDDLGDSLFSDGRSPSLMERKTRDGKQKVPDVFTRMLQPHTVQFSNITETSSKDGLTVIECKRGGDVFSESHSKWLQTVGTNPEAMLFKFVPITSLLNGVPGSGYLSHAINLYLRYKPALEDLQCFLEFQVPRQWAPLFCELPLRHQRRKTSCPRLQFSFMGPKIYVSTTQVLSDDKPVIGLRLFLDGKKSNRLAMHVQHLSSLPDTITHTSSKSTINHRPSQWRGSDEYESSAQFLEPVRWKRFSNVCSSVVKHDPNWLTEEPSGGVYIVTGAQLVTKGKWPKTILHLRLLFTHLPNCTIRKTEWAGAPAVARKSSRFTNLSSTFSFTQRSVANAPKQQSETLNSGVYPDSPPVPVRSTKLRKFVDMDEVARGANDSPGHWLVTAGKLVMDGGKIGLHVKFALLDFAQEL

SEQ ID NO: 524 - protein, 302 aa, Prostanthera rotundifolia
MRFSSDVLSFQQMSEQFNQELSLSHKIPTGHFNAAFEFTGSWQKDAAFTKSLAFDGVFITLYSIALEKSQVTLQDHVKQAVPSSWDPAALARFIEKYGTHIIIGVKMGGKDVVYVKQHYSSPLQPIDVQQRLKDAADKRFSDANGQSSMHPEKSYGREMPVSNERGFAFSDPGTPSFHSNQEEFTFFWRRRGGGSDRNMPHTKWSQTVQIEPEVISMSFIPISSLLSGIDGSGFLGHAINLYLRYKPPIEELHQFLEFQLPKQWAPVFGNVPLGPDRKQQGAASLQFSLMGPKLYVNTEEVD

SEQ ID NO: 525 - protein, 688 aa, Blechnum gibbum
MASAVGGLAAMQAQSSEGAPLQNTASLAFSVAQQAVDALGRGYDVNSDLWLRYCKRGERLIENDNSGPTQDLLLPGNIIIPNVSTSIKCDKGDRMRFTSDVLTFSEMSEQFNQNLSISGKIPVGHFNAMFGFSGSWQKDASQVKTLAMDGVFINLYSVELPRAQLTLKEEVRAAVPSSWDPAALASFLEKYGTHVIVGVKIGGKDMICLKQHRSSTLAAVGVQKILEAKAKERFSSVEGSAAKEKINKGKIRDGSAHEANGMNAVFGSKDGMPLSWMNDTAPDLENDDVTVICKRKGGKDISQSHDEWLDTVPSTPDIVSMSFVPITSLLNGVTGTGFLTHAINHYLRYKPPIQELHHFLEFQLPKEWAPAFGDLPLGPPRKQQGSPSLQFRLMGPKLQVNTTPVVIGKRCVTGLRLHLEGKKSNRLALHLQYLTVVPQILQRLWEDDQTEEWEGPDDDFGKYFEPVMWKSFSHVCTAPVESNEIWVDEAKGEHGPKGALVVTGAQLDVEQHGSKKVLFLRLLYSKIHKAKIRRSEWDHTPASQHKSGIFSALMSTPFTAQAAPVKPVHVVINSAIYPQGPPPAKSQAPKLLKYVDGIFSSLMSTPFTAQAAPVKPVHVVINSAIYPQGPPPAKSQAPKLLKYVDTTEMTRGPLDLPGHWLVTGAKLFVDNGKIAVRAKYSLLLYSVD

SEQ ID NO: 526 - protein, 425 aa, Lygodium flexuosum
MKPAAATIRPNFYTSSSSSAPSDPASVAKQAVDALGRGYDVTGDLWLSKCREPLIVDLAESSPTQDLAIPGGISLPSVPAPIKCDKGDRTRFASDILSFSEMSEQFNKTLSIAGKIPLGLFNSMFGFTGLWQKDASSTKTLALDGVFINLYSVEVPRTHLNLREEVRKAVPSSWDPAALASFVDKYGTHVIVGVKIGGKDVIYVKQRHSSPLSAVSIQKILETKAVERFSSGETCTSKEKLTKGKDFQTKGIHGAEPNGQNGNLLRGHVDGMENSESFSLMEDSSTFSIDGDVTVIYKRKGGSESCQSHNDWLHTVPLAPDVVSMSFVPITTLLNGVPGTGFLSHAINLYLRYKPPLQELSNFLEFQLPKEWAPAFGDLPLGPPRKQQEVPSLQFRLMGPKLHINTTPVNNNLYTTCMLSRVISA

SEQ ID NO: 527 - protein, 416 aa, Tupidanthus calyptratus
MGGKDVIYMKQQHSSSLQPSDVQKRLKTIADKRFVDARGQSGMDSEQTYQKDKFQVREQRLRFADTSLSSSYSYKEDIVSICMRRGGNDNKNLTHNEWLHNVQLEPDVISMSFIPITSLLNGVSGSGFLSHAINLYLRYKPPTEELHQFLAFQLPLHWAPVFSVHPLGLQPRQQSTASLQFSFMGPKLHVNTSPVDVGKRPVTGLRLYLEGKKSNRLAIHMQHLSSLPEFFQLEDDPNGNFRQESYDRRYYEKVQWKNFSHICTAPVESDEDLSIVTGAQFGVGDYGFKRVLFLRLRFSTVRGGLAVKNPEWDGSPGLARKSGLISTLISHHFTATLKPPPQPADVNINSAVYPGDPPGPAQAPKLLKFVDTTEMTRGPQDSPGYWVVSGARLMVEKGRISLRVKYSLLAAILPDE

SEQ ID NO: 528 - protein, 636 aa, Campyloneurum angustifolium
MASAAGGFVAMQPQSSEAVPPQNTPLSVAQQAVDALGRGYDVNSDLWLRYCQHSERLIENSPGPTQDLLLPGNIVIPKVSATIKCDKGDRTRFTSDVLTFNEMSEQFNQNLAISGKIPVGHFNSMFGFSGSWQRDASAVKTLAMDGVFITLYSVELPRAQLTLKEEVRAAVPSSWDPGALASFLEKYGTHVIVGMKIGGKDVICLKQNRSSSLSAVGVQKILEAKGKDRFSSVEGSVAKEKINKGKIRDGSPFGSNGMNAVNGSKDLPWMNDSSAEYSTVETEDVTVIFKRKGGRDLSQSHDEWLHTVPQHPDIVSMSFVPITSLLNGVTGTGFLNHAINHYLRYKPPIQELHHFLEFQLPKEWAPAFGDLPLGPPRKQSGSPSLQFRLMGPKLQVNTTPVVIGKRCVTGLRLHLEGKKSNRLAIHLQYLTVVPQILQQLWQDDQPEEWEGPDDDFSKFFEPVMWKSFSHVCTAPVESTEAWEDEGKGGPGSQGAKVVTGAQLDVQQCGSKKVLFLRLLYSKIYKAKIRRVEWDHTPASQQKSGIFSTLMSTTFSSAQATPQKPVQVVVNSAIYPQGPPAAKSQAPKLLKFVDTTEMTRGPLDLPGHWLVTGAKLFVDRGKIAVRAKYSLLLYSVD

SEQ ID NO: 529 - protein, 538 aa, Selaginella victoriae
MEDSKALTPTGSDDNHSGSQATIAGTEEVIGAASDYDTLPGCEIIGCGYDVLNGRYADATSCRSNLFDIPKEYETVKIADRYFSKPEQIVYQSNIQVLEYTSKGSTITEYTESVTSKMKVEGKYNFFSAEVEASIGMSSAQNLQNEFVQLQQTVSYYNLQLPVNHKDLLKPSVKDDIDNIENTAELFDRYGTHYLAGIIMGGSAMYTSTTNKMSFESSTELDVVAKMSYDELVGSISAEDRTKYEQKIKNFRESSTTELHNKGGDPGLSGQNFPANAEEWNKSVIDYLAFCEFLSSDQSLLGIWELASTPARSKQIQDSYHDYCRDKQTKYNVDPPYLQAKIVPLKRVQFTDTGSHAHDYLTVCIPDVDSGWYYLGQVAFPGGGARGSTIVVKELVAGALIDVKWWQWVWDDSGSHNSKDFSLWYGNSANPVEYYVLGDFFRGGVEHTSPVSAPTANEVAGIKAVSSKCVVEATVGDRIWHDEGTHATYDGSVWKIIPKSGSNAIDTSNMDLYFIASGSWDKPNRPVYLLNKDAVEFV

SEQ ID NO: 530 - protein, 604 aa, Selaginella biformis
MVMSGSEAKAVAAIRALGRGFDVTLDLKLEYAKSCLIEVDQETREIIVPGNVVVENVSKDIKVDKGENMRLRSGVLDFHQMSERFNHKAGIAGKMPLGLFTAMYDLKGPWQVDALSTKSLAMYGYYAILYEVKVTKAPLSLLQEVKNAVSSTWQPLELTRFIEKYGTHIITGVKVGGKDVIYLRQNQSSTLNAADIQRYLESIAEQRFADGGGRSSRRFKVFKKGAKKKVADPFAMIDRSKVINNYSSISISNNNVEVKFKRRGGLDSIRDHNPWLLSVPDAPEVVTMSFVPITSLLAGVPGTGFLTHAINLYLRYKPPIEELQYFLEFQVPRQWSPSLDPSTSQTSSGKLPALQFSPMGPKLHVDTDEVAVGKRPVTGLRLYIQGKKLNRLTVHLHYLSSLPKILEQHWGANSTTTYSDAPRWRRSEDDRQWLEHVQWKSFSHVNTAPVEYVEPCIGDEASAFLVTGAQLQVSDSRTRPVLFLRLQFTRVPGCSIRRSVWDHMPATSQKSSSTGFFSQFGFSSSVNTPNSQNKQPQRFVQNSAVFSGGPSRSVHGSRLLKFVDISEMSKGVQDEPGHWIVTGAKLDVENGKICLKVKYSLLRY

SEQ ID NO: 531 - protein, 284 aa, Huperzia carriata (Solomon Islands)
MLTPSFKEALASMDSDELFTTYGTYYLSEVLVGGRADYVATTKTSAFSSDTQIGVVAESSFKSVAGMEVSSQYKELIKKFQENSSTSLYAIGGSAISSITDTATYNKWLSSIDTLPVFCGFTSASLMPIWELAESPQRQEILKKATQTFIPLEIRRNAIVEVAIIVSSDHQVKPLYGFTKIDFDLNSGAKGKFIYLCYKQQKISVAGSPADPKPITALKVVSSDYHNPSAPSGYIQLDQDLNDGAGGKFIYLCYTKDPAAIPNDEGCNTQRRGWTAHTWHPRYW

SEQ ID NO: 532 - protein, 478 aa, Platycerium bifurcatum
MEPNKGGAPAMKNVAKPSTKRLIPSSIAASSQTSANALTEPLPGSDAIGQSYDAFGFFANPRSIMKELFEFSPQEEIVVEGNTWLLSSDFVYTAIRDTETSTVSRRTKDDYSKELAVKVKLSGSYGFFSASVESDFSQSISDVTDTTYTSVRTHVNKWRLSLKDDVGALRSKLLPGVKQALATMDATQLFDTFGTHYVSEVLVGGRADYVATTKTSAFSSSTSISVAAEASFQSIAGGEVSPESKVLAETLRENSSTRLYALGGSALPNITDPATYNAWLESIDTIPVFCGFTQNSLKPISELADSAQRRDALAKASQSYIPSYVTRPAVVGLEVIISDSNSESPPYGYTRIDYDLNRNAGGKYVFLCYKQKNISVGGDADAITDVLVVYGNDRNPSVPSGYTKIDKDLNSGAGGKYIYFCYSKDKRKQEEGLPIRGLRVVGPHPTSVAPYGFSKIDIDLNMGAGGDFIYLCKSRHLE

SEQ ID NO: 533 - protein, 451 aa, Huperzia squarrosa
MAHIEPLPGSDAIGHSYDVFGFYANPKSVKKELFDFALQKEITSEGHTWLLSTDIEYIAVRDTEIKTVSIRTKDAYSSELAASVKLCGSYGGFSASVESDFSESISDETDSTYTSVRTNVNKWKLSLKHTVEELRSKLKPALKEALASMKAVELLSTYGTHYMAEVLVGGRADYVATTKNSAFSSDTKISIVAESSFKSVAGMKVSAEQKQLIEKFQENSSTSLYAIGGSALSSITNTATYNAWLSSIDTRPVFCGFTRDSLRPIWELAESPRRREILRTATQTFIPSGITRNAIVGVDIIVSDNYSVNPPYGYTRRSYDLNRNAKGKYIFLCYKQQKISVAGSPADPTPITALYVASGDDDNPYVPPGYTKIDKDLNKDHGGKFIYLCYTKDPAAIPNDEDGLPIRGIRVIGSKKVENVVTPYGYTRIEEDLNKGAGGDYIFVCFSRHLD

SEQ ID NO: 534 - protein, 441 aa, Selaginella biformis
MLSGNLAQDFHGLGTAVYLPTIDVLDNVASRRSIFASNVSSLVIKQKYPLVKRSSTFLQDSKELYEELAQTAGVTGTYNSITFSMDQSFKSVSKSKTETTSLYIYCYSFNSKLELIKSKLDKVPLSDAFLKDFRSLPRTINNPSLQSSWVPFADFMRNWGSHFVSAVYQGAWIQQWSVAKSSSKYSQKDFALRACLKLEGSKKLDIDVCAGFSTAEKSSASRLEMSDTLYVKGGTDATRSKLQDARTKELLDKFMLEGSTSEAPVQYNYEPLWQIIRERFPLLSTEWMIARNLEAYYEGFKAFGCELMKSSTGRNIQVLQAVPDSYGTHYTCVRMCRGCHDDNDCHIGGAGSVCYCYGPTCIKVNGNNRPVVQNTHNGKSYDEGENISCRYQVGVWCGCRRSYYYDEPGCDAGGYVTIWDQSTIRYHANSTAGTSTPVAVE

SEQ ID NO: 535 - protein, 323 aa, Selaginella pallescens
MAEHSEQKGSLILESLEEGRKLPGTEILGSGYDVLGGYYADPRSCLVNLFDFPAEVETVQIGNQEFSKSTGIVYHSSIGTDLDMSSGKSIQEYTKEINSKTKLEGNYSFFSASIEADIGIKSAQKSENEFSKAQYNVKFFTLQLPPHHSKMLKPQIKDDIDNMSDLVRLFDMYGTYYLAGILMGGAASSTSSTSTSTFNSSLDVSVAAKIAFQWSIGGLSAEEQAEYKQQVKSFNESSETTVRTTGGKPGIKFPAEIGEWSDSILDYMAFVDYLGSRSLVGIWELASTRERQDELHKFYHKYCRFRQMQIIPLLRARVVCADE

SEQ ID NO: 536 - protein, 451 aa, Huperzia tetratoides
MAHIEPLPGSDAIGHSYDVFGFYANPKSVKRELFDFAPQQEMTSEGLTWLLSTDIVYNAVRDTEIKTISHRTKDAYSSELAASVKLSASYGGFSASVETDFSQSISDETNSTYTSVRTNVIKWKLSLKEIVEELRPMLTPSFKEALASMSAEELFATYGTHYLIEVLVGGRADYVATTKTSAFSSDTEIKVVAESSFKSLAGAEVSSDYKQLIQKFRENSSTSLYAVGGSALSSITDTATYDAWLSSIDTRPVFCGFTTDSLKPIWELAESPERREVLQKATETFIPPEITRNAIVGVDIVVSDNDAVNPPYGYTKINYDLNSNAKGKYIFLCYKQQKISVAGSPADPKPITALYVASGDNNHPSIPSGYTKINVDLNQGSGGKYIYLCYTKDPAAIPSDEDGLPIRGIRVIGSPNSGDVVTPYGFTRINKDLNEGAKGDFIYVCFSRHLD

SEQ ID NO: 537 - protein, 380 aa, Asplenium australasicum
MQLGTTFGLSVPLKVLRLSFSTTFRTIAGSQTNVSSALVLVESYSKRQLILNEQRSIQQIPLRADFLQELRNLPEPPTSITAATQWASYRDFLIRWGSHYASEVYYGSWLRTWATAASTKSYTQRQITAKGCADLTGASPIPTIQGCAGIDTAEMTAASRLDVNVQIEVRGGEPATRAQLTVRRTDQLIQDFVQQGQENDDAAVKYGLVPIWRPILARYHSPSSKEWRVATALEGYYNGFLAFSCPYLTLPDPFTVLQLFRRTSVGTYQCVRQCQGCRRNGDCNVGGASGCYCYGRTCIAALGEDGRASIQTSRDQLPRDVPPNVNCFYNFPSCDCNLTSKEPNCGSDNLIPIWDQAKLVSTASLYTTNSNTAEALSTAE

SEQ ID NO: 538 - protein, 613 aa, Selaginella kraussiana (Variegata)
MTDAYEWMKTLPGCDTIGSGYDILNGYYADARSCLENLFDFSSVDNEIVVVSGTQYTKPKVLTYHSSIQTDLHMSEGESIMEYNRSVNMKTKLEGEYNFFSASVELDIGKASAENQENSFSRIQENVSYFTLQLPSSYCDLLIKPRMKKDIDEMTDLTKLFKTYGTHYVSGMIIGGSATYTASTNKTTFKSKLGLGYVAKMSYQALVGGLSAQLESQYGEDIKAFNQASSTKLMAKGGDPAYGGHDFPKHTKEWRNSVKDNLAFVDFLSNRGLTGIWNLASTDARSKQIEGHYAEYCEKSQTNFNMESPLIRAKIVPLTKVQFTDTGSRASLELAVCIPDIGSDWYYLGQVAVPGHNLPKGSTLAVQEIKPGALVKVNRWEKIWDDQGSGARNDYNLWRGLAENPVDYHVLSDFFRGNVDGYNKQEPPTEQDTRGIVAVHSSCVVPAQVGKMIWNAGGTGASNEASVWQIISTTGLANLMDNLSKTTMDTSHVDLGYVGTADISDGELGLPTKPPPGGNVSTAISNGELGLPTKPPPGGNVSTAISNGELGLPGGNVRTTDFKPPAPQSSIISNRAESIDTSKILPYYVSTLDNYKPHRPVYLLKKSAVQFVN

SEQ ID NO: 539 - protein, 421 aa, Selaginella victoriae
MKVEGKYNFFSAEVEASIGMSSAQNLQNEFVQLQQTVSYYNLQLPVNHKDLLKPSVKDDIDNIENTAELFDRYGTHYLAGIIMGGSAMYTSTTNKMSFESSTELDVVAKMSYDELVGSISAEDRTKYEQKIKNFRESSTTELHNKGGDPGLSGQNFPANAEEWNKSVIDYLAFCEFLSSDQSLLGIWELASTPARSKQIQDSYHDYCRDKQTKYNVDPPYLQAKIVPLKRVQFTDTGSHAHDYLTVCIPDVDSGWYYLGQVAFPGGGARGSTIVVKELVAGALIDVKWWQWVWDDSGSHNSKDFSLWYGNSANPVEYYVLGDFFRGGVEHTSPVSAPTANEVAGIKAVSSKCVVEATVGDRIWHDEGTHATYDGSVWKIIPKSGSNAIDTSNMDLYFIASGSWDKPNRPVYLLNKDAVEFV

SEQ ID NO: 540 - protein, 303 aa, Huperzia phlegmoides
MNSEELFTTYGTHYLSDVLVGGRGDYVATTKTSAFSSDTQISVVAESSFKSVAGMDVPSDYKELIEKFQEKSSTSLYAIGGTALSSITDTATYNAWLSSIDTLPVFCGFTSASLRPIWELAESSQRQQILQKATQTFIPLEIRRNAIVDVDIIVSDNSSVNPPNDHTKIDYDLNRNAKGKYIFLCYKQQKISVAGSPADPKPITALYVASGDDDNPYVPPGYTKIDQDLNKDAGGKFIYLCYTKDPAAIPNDEDGLPIRGIRVIGNEKLENVVTPYGFTRIDEDLNKDAKGDYIFVCFSRHLD

SEQ ID NO: 541 - protein, 486 aa, Equisetum arvense
MAFQMQVFLRMRAMAVAVLLMVCGTKIATCDTIPDVIVGAKSALGKIVNLPRSNILDSLNSGHPLFTAHPESNTEPYSRGGSSLQYFQTSDKLKQHISSDANLDTSAASSLSVTMKTTFDHISGFETNVSVAKAYAESLVSVSYVTKEHLDKLTLRPDFLASFNALPITVANEWTPSAWYHAAEFLETWGTHVIVAAYTGATFDTYSVAKSSLDYSQQELEARACLHAEGFNQALRGCGGFSEAQKKNAATLSANDKRYAKGGSSTTRNRLLSQEVTKEVLDKFLSEAAVDEEPVKYHFMPLWSLLRSRYAARSEEWRRATNLGAYYDGWLGFGCRYVEMKENGVVEPAQWFRFDVNNIGYARCLRRCLGCHSDHQDCFNSNNVCMCGGPSCLVPMTDEAKHGYHVRVENNRRHAWEGMGCDANEQNQCTCENKDSEVGCHVQLNQSSHIRFRAIWDQTPAMFRDLTTTFTSTLPENTPAIIPNAN

SEQ ID NO: 542 - protein, 270 aa, Huperzia carriata (Solomon Islands)
MLAENTKISIVAESSFKSVAGMKVSAEQKQLIENFQENSSTSLYAIGGSALSSITDTATYNKWLSSIDTLPVFCGFTSASLMPIWELAESPQRQEILKKATQTFIPLEIRRNAIVEVAIIVSSDHQVKPLYGFTKIDFDLNSGAKGKFIYLCYKQQKISVAGSPADPKPITALKVVSSDYHNPSAPSGYIQLDQDLNDGAGGKFIYLCYTKDPAAIPNDEDGLPIRGIRVIGNAKFVNVITPYGFTRIDKDLNEGAKGDFIFVCFSRHLD

SEQ ID NO: 543 - protein, 311 aa, Huperzia squarrosa
MQSDAIGHSYDVFGFYANPKSVKKELFDFALQKEITSEGHTWLLSTDIQYIAVRDTEIKTISLRSKDAYSRELAASVKVSGSYGGFSASVESDFSESISDETDSTYTSVRTNVNKWKLSLKPTVEELRSMLTPSFKEALASMNSEELFTTYGTHYLSEVLVGGRADYVATTKNSAFSSDTQISVVAESSFKSVAGMDVSGKYKELIQKFQENSSTSLYAIGGSALSSITNTATYNAWLSSIDTRPVFCGFTRDSLRPIWELAESRQRQEILQKATKTFIPPEIRRNAIVGVKFIVSDNSWVNPPYGYTKIL

SEQ ID NO: 544 - protein, 520 aa, Selaginella pallescens
MAYNRSVNMKTKLEGEYNFFSASVELDIGKASAENQENSFSRIQENVSYFTLQLPSSYCDLLIKPRMKKDIDEMTDLTKLFKTYGTHYVSGMIIGGSATYTASTNKTTFKSKLGLGYVAKMSYQALVGGLSAQLESQYGEDIKAFNQASSTKLMAKGGDPAYGGHDFPKHTKEWRNSVKDNLAFVDFLSNRGLTGIWNLASTDARSKQIEGHYAEYCEKSQTNFNMESPLIRAKIVPLTKVQFTDTGSRASLELAVCIPDIGSDWYYLGQVAVPGHNLPKGSTLAVQEIKPGALVKVNRWEKIWDDQGSGARNDYNLWRGLAENPVDYHVLSDFFRGNVDGYNKQEPPTEQDTRGIVAVHSSCVVPAQVGKMIWNAGGTGASNEASVWQIISTTGLANLMDNLSKTTMDTSHVDLGYVGTADISDGELGLPTKPPPGGNVSTAISNGELGLRNVGTAGIVGGTTTWEPTKPLPPQSSIISNRAESIDTSKILPYYVSTLDNYKPHRPVYLLKKSAVQFVN

SEQ ID NO: 545 - protein, 373 aa, Huperzia phlegmaria
MAQIESLPQSSDYAMDQIEPLPGSDAIGHSYDVFGFYANPKSVKKELFDFALQKEITLEGHTWLLSTDIVHIAVRDTDINTVSLRTKDAYSTELAASVKVSGSYGSFSASVESDFSQSISDETDSTYTSVRTNVNKWKLSLKHTVEELRSKLKPALKEALANMKEVELLSTYGTHYMGEVLVGGRADYVATTKTSAFSSDTKISVVAESSFKSVAGMEVSAEYKELIKKFQENSSTRLYALGGSALSSITDTASYNAWFSSIDTRPVFCGFTRDSLRPIWELAESPQRREILRKAAQTFIPPEITRNAIVGVDIIMSDNYWVNPPYGYTKIDYDLNRNAKGKYIFLCYNQQKIFVGIPCGSDAHHCLVRGFWR

SEQ ID NO: 546 - protein, 392 aa, Selaginella victoriae
MSFPIKKLMFSFDTSFQAISGGRQEIKAAVLQVESYSRRSFFRNNLALQLNPTLVQDLNSLPEPPTITAHRHDWRNHENFLRKWGSHYMTEVRYGSWMRQFTSAASTETYSEIEMKANACARLFGGKLSKIGACAGITQQQINANSNLRVRLTTEVRGGNAQTAAQLRRIPVQESVIESFKVEGRNSNEAVVYHFAPIWQAIKARYSVQTRQWRQADALESFYVGFLAFDCPQRILNTGSSSEPTTLLQQFRRRGEKFQCVRHCVGCRRSKDCNFHTTGNGAPGCYCYGNSCLVAQGAESRIAIQTRRDNLPRNVNPNRSCQQSGVSGCKCDRNPRENGCGADNMIEIWPQTPRNPNPGTLNAYEETGVDIVDDMIMVQEDEVVYDEMKNIM

SEQ ID NO: 547 - protein, 367 aa, Selaginella biformis
MSVPVKVLQLNFEASFNKISGSKTSVKTASVFVETYNQKISLRNHARAIQTLQLNPDFLRDLRNLPEPPNSDSAWGPYRSFFNKWGTHYVSETFHGSWLRQWTVASSTETFTERQMQAKACAKLTGLKGIVPNLGGCAGISLEEMRSAERINTQDTREARGGSPATVSQLLSGSVTDDLIRKFIEEGATSKEAVRYGFVPVWMPVLAQYMSSTSKEWRVATALQAYYEGFLAFSCPVNRLNTPSTVLQQFRRLSNGKYQCVRQCQGCRLDKDCNVGTSGASTGCYCYGGSCINALGPDGRAQVQQKKDNLPRNVLPNRSCEYSFPQCRCNTKSKEPNCGADNMIPIWDQDRDTFQSLDSNILLYDEE

SEQ ID NO: 548 - protein, 338 aa, Asplenium nidus var plicatum
MHCQLIPLRADFLQELRNLPEPPTSITAASQWVSYRDFLLRWGSHYASEVYYGSWLRTWATAASTASYTQRQITAKGCADLTGSSTIPTIGGCRDISLSEMTAASRLDINVQIEVRGGEPGTRAQLTVRRTDQLIQDFIREGQVNDEADVKYGLAPIWRPVLARYHSATSKEWRVATALEAYYNGFLSFPCPYNIENGIVLQQFRRITTGTYRCVRPCQGCRDFHDCNLRQFGCYCYGSTCIAAGGDDNRAWIQRWFTGSRYYPPSSSCYYQFPSCRCNYGWREANCGTDRTITIWDQTKVNVGVHGNETVVEALSIENNVWVSPANSSNIAEAMSFE

SEQ ID NO: 549 - protein, 503 aa, Selaginella victoriae
MDQHTLPGCEILGSGYDVLNGYYADSRSCLTNLFDFPANYETVKVGSQSFTKPVEISYHSSTGTNLYTDAGNTITEFESSINSRTQIEGSYTFFSSSIDVEIGESSAKSIDNAFSKVNYRVDQYTLQLPPKASEYLKKYVQEDIDKMTDLTRLFDTYGTHYLAKLIMGGVANYSATTKKSKFTSNYDLKVVATMSYKSAVGSLSVSEENTYKQSISSFNQSSTISLKTKGGDPGLGGEKFPEHADEWAKSVENYLSFIDFLGVNSLVGIWELASTAKRMAEIKAYYGTYCEIRQKHYFLDDGPLLRARIVQLSKVQFTDAGSGAKRDLSVCIPDIGGGWYYLGQVALPGGGATGNTLVIQEKYPGSGVLLDVDHWEKVWDDHGSKKPKDYSLWRGVAANPVDYVVLSDFFRGGVSSQYEPTAEETVGIKAVAQACVVRGKVGEMVWNDEKSKASDDGSVWSIVPADNTAINTSSIKPYYVSEKSHKSPSRLVYVLKKTAVEFV

SEQ ID NO: 550 - protein, 510 aa, Selaginella victoriae
MDLDAAPMDQHTLPGCEILGSGYDVLNGYYADSRSCLTNLFDFPANYETVKVGSQSFTKPVEISYHSSTGTNLYTDAGNTITEFESSINSRTQIEGSYTFFSSSIDVEIGESSAKSIDNAFSKVNYRVDQYTLQLPPKASEYLKKYVQEDIDKMTDLTRLFDTYGTHYLAKLIMGGVANYSATTKKSKFTSNYDLKVVATMSYKSAVGSLSVSEENTYKQSISSFNQSSTISLKTKGGDPGLGGEKFPEHADEWAKSVENYLSFIDFLGVNSLVGIWELASTAKRMAEIKAYYGTYCEIRQKHYFLDDGPLLRARIVQLSKVQFTDAGSGAKRDLSVCIPDIGGGWYYLGQVALPGGGATGNTLVIQEKYPGSGVLLDVDHWEKVWDDHGSKKPKDYSLWRGVAANPVDYVVLSDFFRGGVSSQYEPTAEETVGIKAVAGACVVRGKVGEMVWNDEKSKASDDGSVWSIVPADNTAINTSSIKPYYVSEKSHKSPSRLVYVLKKTAVEFV

SEQ ID NO: 551 - protein, 319 aa, Selaginella victoriae
MESKDWLPGTYSIGSGYNVLTGYYADSKSCLTGLFQFPEKYETVKVGEKYFSKPKSISYHPSFHTYEYTAQGKSIIEYTQNFNSKTKVEGEYNFFSASIEEEIGISSAENLEKQFSKVHHIVELFTLQLTPHHKSLLKPKVKEDIDTMHNLTKLFNKYGTHYLTGLVMGGTATYTAITSKTTFESSFNLGLVANMAYKSAVGSLSAEEKAKYNQSIKSFCESSSTKLETKGGDPALGGASFPQHASEWSKSVLEYMAMVDFAALRGSGSSPLPKNVKSRYTPSIPTTASRTKSGTTLTDHSCVPKLCPCRPKSSPISSP

SEQ ID NO: 552 - protein, 252 aa, Huperzia carriata (Solomon Islands)
MAGMKVSAAHMQLIQKFQENSSTSLYAIGGSALSSITDTATYNKWLSSIDTLPVFCGFTSASLMPIWELAESPQRQEILKKATQTFIPLEIRRNAIVEVAIIVSSDHQVKPLYGFTKIDFDLNSGAKGKFIYLCYKQQKISVAGSPADPKPITALKVVSSDYHNPSAPSGYIQLDQDLNDGAGGKFIYLCYTKDPAAIPNDEDGLPIRGIRVIGNAKFVNVITPYGFTRIDKDLNEGAKGDFIFVCFSRHLD

SEQ ID NO: 553 - protein, 252 aa, Huperzia nummarifolia
MAGVKVSAAQKQLINKFQENSSTRLYAIGGSALSSITDTATYNAWLSSIDTLPVFCGFTSASLLPIWELAESSQRQDILQKATQTFIPLEIRRNAIVDMDIIVSDNYVVNPPYGFTKIDYDLNRNAKGKYIFLCYKQQKISVAGSPADPKPITALYVTSGDDYNPYVPPGYTKIDKDLNKDAGGKFIYLCYTKDPAAIPNDEDGLPIRGIRVIGNEKIENVITPYGFTSINTDLNDGAGGYNIFVCFSRHLD

SEQ ID NO: 554 - protein, 597 aa, Selaginella pallescens
MVISGAETKAVAAIQALGCGFDVTLDHKLEYAKSRLVDLDPETRTVVVPGNIIVEDVSMDIKVDKGENTRLRTDALDFHQMSERFNQGCGIPGKMPLGLLTAMYDLKGPWQLDALSTKCLAFDGYIAVLYEMKVAKSLISLLREVKDAVPSNWQPLELTRFIEKYGTHVITGVKVGGKDVIYLRQSQSSKLSAVDIQRYLESLAEQRFADGSGRRFKVFKKGAKTKVADPFAMIDRSKVINNFSSISISDDNVEVKFKRRGGLDSIRDHGPWLLSVPNAPEVVSMSFVPITSLLAGVPGTGFLTHAINLYLRYKPPIDELQFFLEYQVPRQWSPTLDASNQTSSSNLPALQFSPMGPKLHVSTDEATAGKRPVTGLRLYIQGKKLNRLTIHLQHLSSLPKILESHWGASNTYNDAPQWKSCEDEPRWLEPVQWKSFSHVNTAPVEYVEQCIGDETGDFIVTGAQLEVSDSRTRPVLSLRLQFTRVPGCSIRRSVWDNMPAMQKSSSGFFSQFGFSNVSNAQHKQQQSQQQRFVQNSAVFSGGPSRSVHGSRLLKFVDVSEMSKGVQDEPGHWIVTGGKLDVEGGKICLKVKYSLLKY

SEQ ID NO: 555 - protein, 311 aa, Platycerium bifurcatum
MKEVERLSTYGTHYMGEVLVGGRADYVATTKTDFVATTKNRAFSSDTKISTVAESSFKSVAGMKVSAEQKQLIEKFQENSSTSLYAIGGTAISSITDTDTYNAWLSSIDTCPVFCGFTYESLQPIWELAESPQRQEILQKATKTFISPEIKRNAIVDVDIIVSDNYGVNPPFVLQATEDDLNRNAKGKFIFLCYNQQKISVAGSPADPKPITALYVASGDDDHPYVPPGYTRISSDLNEGAGGKFIYLCYTKDPAAIPSDEDGLPIRGIRVIGNENIDNVVTPYGFTKIDKDLNEGAGGDFIYVCFSRHLD

SEQ ID NO: 556 - protein, 287 aa, Asplenium antiquum (makino)
MSFCWRLSGGSSMLGARCSWLGLQGQGQGQGMAASTPSSLGTTFGLSVPLKVLRLSFSTTFRTIAGSQTNVSSALVLVESYSKRQLILNEQRSIQQIPLRADFLQELRNLPEPPTSITAATQWASYRDFLIRWGSHYASEVYYGSWLRTWATAASTKSYTQRQITAKGCADLTGASPIPTIQGCAGIDTAEMTAASRLDVNVQIEVRGGEPATRAQLTVRRTDQLIQDFVQQGQENDDAAVKYGLVPIWRPILARYHSPSSKEWRVATALEGYYKSTMASWRSLVPT

SEQ ID NO: 557 - protein, 335 aa, Asplenium antiquum (makino)
MSTMGGAAVTHVLLLLLLLLLLSASADGAVSIGSTVYLPESNLGAPLSPLRISIFEGDISSFLRNQSLHHTYNTQRFQSTSDSVFGELGTTFGLSVPLKVLRLSFSTTFRTIAGSQTNVSSALVLVESYSKRQLILNEQRSIQQIPLRADFLQELRNLPEPPTSITAATQWASYRDFLIRWGSHYASEVYYGSWLRTWATAASTKSYTQRQITAKGCADLTGASPIPTIQGCAGIDTAEMTAASRLDVNVQIEVRGGEPATRAQLTVRRTDQLIQDFVQQGQENDDAAVKYGLVPIWRPILARYHSPSSKEWRVATALEGYYKSTMASWRSLVPT

SEQ ID NO: 558 - protein, 268 aa, Platycerium bifurcatum
MGEVLVGGRADYVAITKTSAFSSETKISAVAESSFNSMAGVKVSAAQKQLINKFQENSSTRLYAIGGSALSSITDTDTYNAWLSSIDTRPVFCGFTRCSFKSVAGMEVSSQYKELIKTFQENSSTRLYAIGGTTISSITDKDTYNAWLSSIDTRPVFCGFTYESLQPIWELAESPQRQEILQKATKTFISPEIRRNAPEIKRNAIVDVDIIVSDNYGVNPPYGYTKIDYDLNRNAKGKYIFLCYTEDISSRIPCGSEAHHCFVRGFWR

SEQ ID NO: 559 - protein, 394 aa, Asplenium nidus var plicatum
MRSTSNTQRFQRTSDQVFRELGTTFSLSFPIKVLRLSFGATFRSIASSQTNVASALILVESYSRRLLILNEQRSIQQIPLRADFLQELRNLPEPPTSITAAAQWASYRQFLLRWGSHYASEVYYGSWLRTWATAASTASYTQRQITAKGCADLTGSSTIPTIGGCRDISLSEMTAASRLDINVQIEVRGGEPGTRAQLTVRRTDQLIQDFIQQGQDNDYAAVKYTLAPIWRPVLAQYHSSSSKEWRVATALEGYYNGFLAFSCPYLTLPDPYTLLQLFRRTSSGTYQCVRHCQGCRRNGDCHLSGSGCYCYGRTCIAALGEDGRASIQTSKDNQPRNVPPNVNCFYSFPNCKCNLMSKEMNCGSDNFIPIWDQAKVGTLYHANNSNALESLSFE

SEQ ID NO: 560 - protein, 315 aa, Huperzia goebelii (Holub)
MLTPSFKEALASMNSEELFTTYGTHYLSEVLVGGRADYVATTKTSAFSSDTEIKLAAESSFKSMAGMGNSSQYKELIQKFQENSSILLYAIGGTALSSITDTTTYNAWLSSIDTRPVFCGFTRDSLRPIWELAESPQRQEILQKATKTFIPLEIRRNAIVDVDIIVSDNCWANPPYGYTKIDYDLNRNAKGKYIFLCYNQQKISVAGSPADPKPITALYVASGDNNNPYVPPGYTMINKDLNAGAGGNFIYLCYTKDPAAIPNYQDGLPIRGIRVIGNEKVENVVTPYGFTKINTDLNDGAGGDYIFVCFSRHLD

SEQ ID NO: 561 - protein, 449 aa, Asplenium australasicum
MFCVEFLHAADGAVSIGSTVYLPESNLGAPLSPLRISIFEGDISSFLRNQSLHHTYNTQRFQSTSDSVFGELGTTFGLSVPLKVLRLSFSTTFRTIAGSQTNVSSALVLVESYSKRQLILNEQRSIQQIPLRADFLQELRNLPEPPTSITAATQWASYRDFLIRWGSHYASEVYYGSWLRTWATAASTKSYTQRQITAKGCADLTGASPIPTIQGCAGIDTAEMTAASRLDVNVQIEVRGGEPATRAQLTVRRTDQLIQDFVQQGQENDDAAVKYGLVPIWRPILARYHSPSSKEWRVATALEGYYNGFLAFSCPYLTLPDPFTVLQLFRRTSVGTYQCVRQCQGCRRNGDCNVGGASGCYCYGRTCIAALGEDGRASIQTSRDQLPRDVPPNVNCFYNFPSCDCNLTSKEPNCGSDNLIPIWDQAKLVSTASLYTTNSNTAEALSTAE

SEQ ID NO: 562 - protein, 278 aa, Platycerium bifurcatum
MSGGYGGFSASVESDFSQSISDETDFTYTSVRTNVNKWKLSLKPTVEELRSMLTPSFKEALASMDSEELFTTYGTHYLSEVLVGGRADYVATTKTSAFSSDIQISVVAECSFKSVAGMDVSAKYKELIQKFQENSSTSLYAIGGTALSVDSLTKVFSPFGNSLNPLSARRSSKRLRPITALYVASGDDDNPYVPPGYTKIDQDLNKDAGGKFIYLSYTKDPAAIPNDEDGLPIRGIRVIGNENIDNVVTPYGFTKIDKDLNEGAGGDFIYVCFSRHLD

SEQ ID NO: 563 - protein, 406 aa, Selaginella victoriae
MLLRATVAPTASPASSPIARVSVETAETTNMRMKLIMVSKINACRMLVAGMVAPMWSTSAKSCRKTKLALTEPTTWPQVKDDIDNMTELDKVYDTYGTHYLGSIVMGGHASYTSATNKNKFKSSLELGFAAQVAGSLSVEEKVKYKSDIESFSESSSTKIQTSGGDPGLSGPDFPEHVGQWMDSVKEYMTLADFIAGETLGLWKLASTAQRQQQLRDHYSDYCKRNQSHFSGDVRPLRVKVVPLTNTIIENNWFSVSSPDVGGDWSYLGQVWDINGSTIVVAEAEPGSGILGDIARWEKIYEYDNHSYWRGVASNPVDYAVLSDFMKEGDSEPSAEETAGIKAVHTSCLTTEVCTASGYFSHGIYPVQMPYDPSLDNIKPYYWVTGDSEDQRQVHHLKGSCLQVEG

SEQ ID NO: 564 - protein, 463 aa, Selaginella biformis
MADSPLVSVNLRAPVGEHGFRMLKSPVFKEQHLERLWKSIDPHYKQKQLWASDSGTPLGDHDDNLESLPGCNIVGCGYNVLHGYYADARSCLQDLFDLESSGMSKVSVGAKEFAKPNVVIMRPKYATSTYVETGKTIEQYNSSISSKTQLQGEYNFFSASVEVDIGINQAENLQNEFTKVQSDVETFVLQLDVGHEKMLKPQVKKDIDEMKDLDNLYDTYGTHYLRTIVMGGHATYTSSTNKNEFSSEFELGVVASMSFKALVGSISASEEAKYTSSIQSFNESSTTKIETSGGDPGLGGTYFAKHVDEWINSVKDYMTLADFVHGETVPLWRLASTAEREDALQKHYLDYCKRKQTTYTLSGIPPLRVRRVPVTEGFQPYYHVGTPDIGGKRHSTSTSQEGASDRRLSTILPRRHPRHRRQLVLLRSNKWLRLHNCGSGDSARLRCVGAHSQVGKDWRRLWL

SEQ ID NO: 565 - protein, 518 aa, Selaginella biformis
MLKSPVFKEQHLERLWKSIDPHYKQKQLWASDSGTPLGDHDDNLESLPGCNIVGCGYNVLHGYYADARSCLQDLFDLESSGMSKVSVGAKEFAKPNVVIMRPKYATSTYVETGKTIEQYNSSISSKTQLQGEYNFFSASVEVDIGINQAENLQNEFTKVQSDVETFVLQLDVGHEKMLKPQVKKDIDEMKDLDNLYDTYGTHYLRTIVMGGHATYTSSTNKNEFSSEFELGVVASMSFKALVGSISASEEAKYTSSIQSFNESSTTKIETSGGDPGLGGTYFAKHVDEWINSVKDYMTLADFVHGETVPLWRLASTAEREDALQKHYLDYCKRKQTTYTLSGIPPLRVRRVPVTEGFQPYYHVGTPDIGGNWSYFGQTNGYGYTIVVQETQPGSAVLGRIAKWEKIGDVYGCSVWRGVPADPVDYVVLSDFTHRGSNAPTAEETVGIMAVHRSCLISIGSGSGLDNPSWDFCMWGVDPVYNPKVSLLEDLKLYVMVIFSGQGTREMYRLLASELQVED

SEQ ID NO: 566 - protein, 450 aa, Selaginella victoriae
MASFLLSISALLSFSSLTLGSEIYFGNGVDLPRSNLHANQNPTLLRRIFEGNLSRFLHDEPYHQIVNNRKYVASSEELYREFGQTFGISAPIKVLQLSFTQTFDSIASSKNETQSLFIRTESYSRRVFLRNEKRVVQELQLRTEFIGELRNLPEPPSEIKGGEWSDYNNFLRKWGTHYISEVYFGTWLRQWSVASSSSKYSERQLTARACAKLIGTKAISTIGGCAGVSTQEITEAMRYNTRDTTEVRGGSESTAAQLATNLTDEVVKKFLEEGRTSQTPVLYKFTPIWTPVLAQFPSNTKEWRVGAALQAYYEGYSAFGCQYDSLNVPPTILQLFRRTLNGRYECVRQCEGCRRDKDCNVHAGGCYCYGNSCINGNGEDGRAQVQTKKDELARDQGPNRSCEYEFPSCKCNTMSKERNCGRDNFIPIWVQNEDRVSWAKDNNLVLVQDV

SEQ ID NO: 567 - protein, 439 aa, Selaginella victoriae
MVDRAEFMQSSTKVFQFSNPNAPQLIFRENVADFVTNESFSRMVDRAEFMQSSTQVFQFFGISFGMSFPIKKLMFSFDTSFQAISGGRQEIKAAVLQVESYSRRSFFRNNLALQLNPTLVQDLNSLPEPPTITAHRHDWRNHENFLRKWGSHYMTEVRYGSWMRQFTSAASTETYSEIEMKANACARLFGGKLSKIGACAGITQQQINANSNLRVRLTTEVRGGNAQTAAQLRRIPVQESVIESFKVEGRNSNEAVVYHFAPIWQAIKARYSVQTRQWRQADALESFYVGFLAFDCPQRILNTGSSSEPTTLLQQFRRRGEKFQCVRHCVGCRRSKDCNFHTTGNGAPGCYCYGNSCLVAQGAESRIAIQTRRDNLPRNVNPNRSCQQSGVSGCKCDRNPRENGCGADNMIEIWPQTPRNPNPGTLNAYEETGHVNNPE

SEQ ID NO: 568 - protein, 586 aa, Athyrium filix-femina
MCIEQVKAMAESMSSIERALHALCVVGSDEKDNGVTALGSQMLLKQPEGFSLNNASEASDEMLFAFSSSEESSAFQESVMKNGWNANLELKSKQNPFFQIHVSGSLEENMHHREEEKKEGKQHVAYIMKSLYIPKKSFQIPKHNMRLCDSALASVQEVKNLSDALRFLEAYGSHVSQSWYHLGGVLFEVITVSCAETTSLSDLLHEGARAMKASVTACSGFVGSATVKGSSSSSESHKTSSNKASNFKQSAKRVQALGPTNVRDEDEFRSKLEEGPSSWSIINKGVDRVEDLVAVWNILLQQRQYAETDHAKEILERAAMLLYKAWLNKARSSRRQYRQMIAALIECEERNYYRFQHQLQLHHVDEPEEEVSPLAAALTWVSPAVELPQKLQTVLADQSSLDLSPKVSYFLRSCIAHLSSTSGGENDLRKIVIVINRYGYDQYGNAEFSMYAQHLRSMIEDLNKLNRMEENSTDPQHPIDLNWENTSFCLTIDDCLQIPAEYTYIGDVLVDKPLMKQKQGGGQIQSAHARQLILIDRLRHNLDPFQRPSLEGKPKWKRNSSRANKLAWLEHSKIQEAVYLRIFCRS

SEQ ID NO: 569 - protein, 407 aa, Asplenium prolongatum x Asplenium antiquum (Kurata)
MLLNTTPNSREKCPPSSPFRCLYTRCRSVWSQLYHNTHQLTSDSVFGELGATFGLSVLPIEVLRFSLGATFRFLASSQANVSSALILVESYSKRQVLLNERSSLQKIPLRNDFLRELRDLPEPPFSVTADEDWVPYREFLIRWGSHYVSEVYYGSWLRTWSTAASSKSYTALQLQAKACAALTGVASIPAIEACANIDLGDMAEASRLDMNVQVEVRGGEPGTRAQLSVHRTDQLIRDFIEEGQKNEDAVVKYSLLPIWRPVLAQYRSPSTKEWKVATALEGYYNGYLAFSCPYIALSDPLKVVLQQFRRAPNGNGTYECVRQCQGCKRDRDCHLRGIGCYCYGRTCVAAPEGRARNQTSPDRLPRNVPPNVNCQYSFPSCKCHSISKEANCGTENLIPIWKQASGR

SEQ ID NO: 570 - protein, 337 aa, Selaginella victoriae
MSSNNVEVMFRRRGGLDSKKDHSSWLASVPERPEVISMSFVPITSLLSGVPGAGFLTHAINLYLRYKPPLEELHYFLEFQIPRQWTPPLELPSNVSNSGLPVLQFSPFGAKLYVSLEEATVGRLPVTGLRLYIQGKRRNRLSVHLQYLASLPRILASHWGTNVYSETPVWMKSEDNPKWFLPVQWKSYSQVNTAPVEFGASYIGDKGAAFVVTGAQLQVSTHKTRNVLYLGLQFTRIPGCSVRRSAWDNMPTASQKSGSGFFSQLGLSTTLSTLNASPAPERFVQNSAVFSGEPSVSTKNSKMRKYVDITEMSKGIQDQPGHWIISGGKLDVENDQD

SEQ ID NO: 571 - protein, 452 aa, Selaginella biformis
MADSPLVSVNLRAPVGEHGFRMLKSPVFKEQHLERLWKSIDPHYKQKQLWASDSGTPLGDHDDNLESLPGCNIVGCGYNVLHGYYADARSCLQDLFDLESSGMSKVSVGAKEFAKPNVVIMRPKYATSTYVETGKTIEQYNSSISSKTQLQGEYNFFSASVEVDIGINQAENLQNEFTKVQSDVETFVLQLDVGHEKMLKPQVKKDIDEMKDLDNLYDTYGTHYLRTIVMGGHATYTSSTNKNEFSSEFELGVVASMSFKALVGSISASEEAKYTSSIQSFNESSTTKIETSGGDPGLGGTYFAKHVDEWINSVKDYMTLADFVHGETVPLWRLASTAEREDALQKHYLDYCKRKQTTYTLSGIPPLRVRRVPVTEGFQPYYHVGTPDIGGNWSYFGQTNGYGYTIVVQETQPGSAVLGRIAKWEKIGDVYGCSVWRGVPADPVDYVVLSDC

SEQ ID NO: 572 - protein, 451 aa, Huperzia carriata (Solomon Islands)
MAEIKPLPGSDSIGHSYDVFGFFANLKSVKRQLFDFAPQEEITLEGHNWLLSADIEYTAARDTEIKTISDRTTDAYSTELAASVKVSGSYGYFSASVESDFSQSISDETDSTYTSVRTNVTKWKLNLKPTVEELRSMLTPSFKEALASMDSDELFTTYGTYYLSEVLVGGRADYVATTKTSAFSSDTQIGVVAESSFKSVAGMEVSSQYKELIKKFQENSSTSLYAIGGSAISSITDTATYNKWLSSIDTLPVFCGFTSASLMPIWELAESPQRQEILKKATQTFIPLEIRRNAIVEVAIIVSSDHQVKPLYGFTKIDFDLNSGAKGKFIYLCYKQQKISVAGSPADPKPITALYVASGDNNNPYVPPGYTMINRDLNAGAGGNFIYLCYTKDPAEIPSDEDGLPIRGIRVIGNEKVENVVTPYGFTKIDKDLNEGAGGDFIFVCFSRHLD

SEQ ID NO: 573 - protein, 284 aa, Huperzia nummulariifolia
MNSEELFTTYGTHYLSEVLVGGRADYVAYVATTKTSAFSSDTEISLAAESSFKSMAGMENSSEYKELIQKFQENSSTRPYAIGGTRTLQHKDTATYNAWLSSIDTLPVFCGFTSASLRPIWELAESSQRQEILQKATKTFISPEIKRNAIVDVDIIVSDNYGVNPPYGFTKIDFDLNRGAKGKFIYLCYKQQKISVAGSPADPKPITALNVVSSDYHDPSGPSGYTMIYTDLNQGVGGKFIYLCYTKDPAASRWTASYVASALLVTKISTMWLHLTDSRGLMKI

SEQ ID NO: 574 - protein, 276 aa, Huperzia nummarifolia
MLTPSFKEALASMNSEELFTTYGTYYLSEVLVGGRADYVATTKTSAFSSDTKISLVAESSFKSVAGMEVSADYKELIKKFQENSSTRLYAIGGSALSSITDTATYNAWLSSIDTLPVFCGFTSASLLPIWELAESSQRQDILQKATQTFIPLEIRRNAIVDMDIIVSDNYVVNPPYGFTKIDYDLNRNAKGKYIFLCYKQQKISVAGSPADPKPITDLYVASGDNKNPSVPRGYTKINRDLNDGAGGKYIYLCYTKDPAEIPNDEDGLPIRGIRVI

SEQ ID NO: 575 - protein, 448 aa, Huperzia tetratoides
MAHIEPLPGSDAIGHSYDVFGFYANPKSVKRELFDFAPQQEMTSEGLTWLLSTDIVYNAVRDTEIKTISHRTKDAYSSELAASVKLSASYGGFSASVETDFSQSISDETNSTYTSVRTNVIKWKLSLKEIVEELRPMLTPSFKEALASMSAEELFATYGTHYLIEVLVGGRADYVATTKTSAFSSDTEIKVVAESSFKSLAGAEVSSDYKQLIQKFRENSSTSLYAVGGSALSSITDTATYDAWLSSIDTRPVFCGFTTDSLKPIWELAESPERREVLQKATETFIPPEITRNAIVGVDIVVSDNDAVNPPYGYTKINYDLNSNAKGKYIFLCYKQQKISVAGSPADPKPITALYVASGDNNHPSIPSGYTKINVDLNQGSGGKYIYLCYTKDPASDEDGLPIRGIRVIGSPNSGDVVTPYGFTRINKDLNEGAKGDFIYVCFSRHLD

SEQ ID NO: 576 - protein, 499 aa, Huperzia salvinioides
MTRIPLTLQFVNVNKWKLSLKPTVEELRSMLTPSFKEALASMNSEELFTTYGTHYLSEVLVGGRADYVATTKTSAFSSDIQISVVAESSFKSVAGMDVSSKYKELIQIFQENSSTSLYAIGGSALSSITDTATYNAWLTSIDTRPVFCGFTCESLQPIWELAETSERREILQKATQTFIPLEIRRNAIVEVDIIVSDNHLVNPPYGYTKIDYDLNRNAEGKYIFLCYNQQKISVAGSPADPKPITALDVASGDDDDPDVPPGYTRINSDLNEGAGGKYIYLCYTKDPAAIPSDEDGLPIRGIRVIGNEKVEYVITPYGFTRINKDLKKATMTFIPPEIRRNAIVDVDIIVSDNYSVNPPYGYTKIDYDLNRNAEGKYIFLCYNQQKISVAGSPADPKPITALDVASGDDDDPDVPPGYTRINSDLNEGAGGKYIYLCYTKDPAAIPSDEDGLPIRGIRVIGNEKLENVVTPYGFTKIDKDLNEGAGGDYIFVCFSRHLD

SEQ ID NO: 577 - protein, 453 aa, Huperzia tetratoides
MAHIEPLPGSDAIGHSYDVFGFYANPKSVQRQLFDFAPQQEITSEGHAWLLSTDIESIAVRDTEIKTVSLRTKDEYSRELAASVKVNGSYGGFSASVESDFSQSIAQETDSTYTSVRTNVNKWKLSVKPTVEELRSMLTPSFKEALASTDPVELFTTYGTHYLIEVLVGGRADYVATTKTSAFSSDTQLSAAAEMSFKSVAGMEVSAQDKELIKKFQENSSTRLYAIGGTALSSITDTATYNAWLTSIDTLPVFCGFTSASLQPIWELAGSSQRQEILQKATQTFIPLEIRRNAIVDLQVIVSDNHLVNPPYGFTKIDYDLNRGAKGKYIYLCYKQQKISVAGSPADPKPADPKPITALYVASGDNNHPSIPSGYTKINVDLNQGSGGKYIYLCYTKDPASDEDGLPIRGIRVIGSPNSGDVVTPYGFTRINKDLNEGAKGDFIYVCFSRHLD

SEQ ID NO: 578 - protein, 306 aa, Selaginella victoriae (LW10887)
MDQHTLPGCEILGSGYDVLNGYYADSRSCLTNLFDFPANYETVKVGKVGSQSFTKPVEISYHSSTGTNLYTDAGNTITEFESSINSRTQIEGSYTFFSSSIDVEIGESSAKSIDNAFSKVNYRVDQYTLQLPPKASEYLKKYVQEDIDKMTDLTRLFDTYGTHYLAKLIMGGVANYSATTKKSKFTSNYDLKVVATMSYKSAVGSLSVSEENTYKQSISSFNQSSTISLKTKGGDPGLGGEKFPEHADEWAKSVESSTSSVSTAWSAYGSLRPPQNAWQRSKRTMARTVRSGRRRSASPCSDCPAK

SEQ ID NO: 579 - protein, 410 aa, Asplenium nidus var plicatum
MRSTSNTQRFQRTSDQVFRELGTTFSLSFPIKVLRLSFGATFRSIASSQTNVASALILVESYSRRLLILNEQRSIQLIPLRADFLQELRNLPEPPTSITAASQWVSYRDFLLRWGSHYASEVYYGSWLRTWATAASTKSYTQRQITAKGCADLTGSSRIPIIGGCRDIAISEMTAASRLDINVQIEIRGGESGTRAELAVRRTDRLIQDFIREGQVNDEADVKYGLAPIWRPVLARYHSATSKEWRVATALEAYYNGFLSFPCPYNIENGIVLQQFRRITTGTYRCVRPCQGCRDFHDCNLRQFGCYCYGSTCIAAGGDDNRAWIQRWFTGSRYYPPSSSCYYQFPSCRCNYGWREANCGTDRTITIWDQTKVNVGVHGNETVVEALSIENNVWVSPANSSNIAEAMSFE

SEQ ID NO: 580 - protein, 252 aa, Huperzia carriata (Solomon Islands)
MGEVLVGCRGNYVATTKISEFSSYTKISIVAESSFKSVAGMKVSAEQKQLIEKFQENSSTSLYAIGGSALSSITDTATYNKWLSSIDTRPVFCGFTRDSLRPIWELAESPQRREILRKATQTFIPPEITRNAIVGVDIIMSDNYWVNPPYGYTKIDYDLNRNAKGKYIFLCYKQQKISVAGSPADPKPITALYVASGDDDNPYVPAGYTKIDKDLNKDAGGKFIYLCYTKDPAAIPNDEDGLPHTWHPRYRQ

SEQ ID NO: 581 - protein, 268 aa, Huperzia nummulariifolia
MNSEELFTTYGTHYLSEVLVGGRADYVATTKTSAFSSDTEISLAAESSFKSMAGMENSSEYKELIQKFQENSSTRPYAIGGTRTLQHKDTATYNAWLSSIDTLPVFCGFTSASLRPIWELAESSQRQEILQKATKTFISPEIKRNAIVDVDIIVSDNYVVNPNYGFTKIDYDLNCGAGGKYIFLCYKQQKISIAGSAADPKPITALYVATGDNDKPSVPAGYTKINRDLNDGAGGKYIYLCYTKDPAASRWTASYVASALLVTKISTM

SEQ ID NO: 582 - protein, 329 aa, Selaginella victoriae
MKVEGKYNFFSAEVEASIGMSSAQNLQNEFVQLQQTVSYYNLQLPVNHKDLLKPSVKDDIDNIENTAELFDRYGTHYLAGIIMGGSAMYTSTTNKMSFESSTELDVVAKMSYDELVGSISAEDRTKYEQKIKNFRESSTTELHNKGGDPGLSGQNFPANAEEWNKSVIDYLAFCEFLSSDQSLLGIWELASTPARSKQIQDSYHDYCRDKQTKYNVDPPYLQAKIVPLKRVQFTDTGSHAHDYLTVCIPDVDSGWYYLGQVAFPGGGARGSTIVVKELVAGALIDVKWWQWVWDDSGSHNSKDFSLWYGNSANPVEYYVLGDFFRGALL

SEQ ID NO: 583 - protein, 488 aa, Selaginella pallescens
MSYTSSIVFSFVLAALLFYPFCVQSSNVHIGNGLYLPDTNLMVPINSQYTIFEGDISRFLREEPLGITFNNKVFSRDTESLYREFSQTFGLNAQYRVVQISVDLGITFNNKVFSRDTESLYREFSQTFGLNAQYRVVQISVEQSLQHIAGSETNVTALSIDVLTYSKKLSIRNEARTITRIPLREAFLQELRQLPEYPADGDNNWLPYLRFMRKWGSHYVNAVYYGSWFQQWSTASSTMRFTERQFQARACVAVEGVGNKFPSVEACAGVGEQEKRAASSLSMRTRLVVRGGEPRTASMLSSGQRTDELLQQFIEEGLDSTVAVRYEFTPLWTQVLADYGMNTREGRIASAMEAYYEGFLAFGCPRMTTTNNIAMQRFRRSVSNLYSCERKCEGCSVAADCNRIGNSQICKCFGNSCIRLIEDNPEDRVEVQTTRDDLRQNEGPNRSCQFSGSSCRCVASAESNCVAGYRAIWNQWDALAEKDAVQVM

SEQ ID NO: 584 - protein, 300 aa, Huperzia nummarifolia
MEQIEPLPGSDAIGHSYDVFGFFANPKSVKSQLFDFAPQEEITLEGHNWLLSTDIEYTAVRDTQIETVSYLTKDAYSRELAASVKVSGSYGGFSASVESDFSQSISNESDSTYTSVRTNVNKWKLSLNPTVKELRSMLTPSFKEALASMNSEELFTTYGTYYLSEVLVGGRADYVATTKTSAFSSDTEISLAAESSFKSMAGMENSSEYKELIQKFQENSSILLYAIGGTALSSITDNDTYNAWLNAWLSSIDTLPVFCGFTSASLLPIWELAESSQRQDILQKATQTFIPLEVRRNAIV

SEQ ID NO: 585 - protein, 368 aa, Selaginella kraussiana (Variegata)
MAEHSEQKGSLILESLEEGRKLPGTEILGSGYDVLGGYYADPRSCLVNLFDFPAEVETVQIGNQEFSKSTGIVYHSSIGTDLDMSSGKSIQEYTKEINSKTKLEGNYSFFSASIEADIGIKSAQKSENEFSKAQYNVKFFTLQLPPHHSKMLKPQIKDDIDNMSDLVRLFDMYGTYYLAGILMGGAASSTSSTSTSTFNSSLDVSVAAKIAFQWSIGGLSAEEQAEYKQQVKSFNESSETTVRTTGGKPGIKFPAEIGEWSDSILDYMAFVDYLGSRSLVGIWELASTRERQDELHKFYHKYCRFRQMQIIPLLRARVVPFAQMSRLGSNLAAWAPDEPDMPFGWYYLGQVWYTRAPTKWSRPSGFEL

SEQ ID NO: 586 - protein, 374 aa, Huperzia goebelii (Holub)
MAEIESLPQSSDYAMDQIEPLPGSDAIGHSYDVFGFYANPKSVNRQLFDFAPQQEITLEDHTWLLSTDIVYIAVRDTDIKTVSYRTKDAYSTELAASVKVSGSYGSFSASVESDFSQSISDETDSTYTSVRTNVNKWKLSLKPTVEELRSMLTPSFKEALASMNSEELFTTYGTHYLSEVLVGGRADYVATTKTSAFSSDIQISVVAESSFKSVAGMDVSSKYKELIQIFQENSSTRLYAIGGTALSSITDTTTYNAWLSSIDTRPVFCGFTRDSLRPIWELAESPQRQEILQKATKTFIPLEIRRNAIVDVDIIVSDNCWANPPYGYTKIDYDLNRNAKGKYIFLCYNQQKISVAGSPADPKPITALYVASGD

SEQ ID NO: 587 - protein, 288 aa, Huperzia nummarifolia
MKVSAEQKQLIEKFQENSSTSLYAIGGSALSSITDTATYNAWLSSIDTRPVFCGFTRDSLRPIWELAESPQRREILRKATQTFIPPEITRNAVVGVDIIMSDNYWVNPPYGSQRREILQKATETFIPPEITRNAVVGVDIIMSDNYWVNPPYGYTKIDYDLNRNAKGKYIFLCYKQQKISVAGSPADPKPITALYVTSGDDYNPYVPPGYTKIDKDLNMNSGGKYIFLCYTKDPAASKDGLPIRGIRVIGNEKLENVVTPYGYTRIDQDLNKGAGGDYIFVCFSRYVD

SEQ ID NO: 588 - protein, 451 aa, Huperzia squarrosa
MAQIEPLPGSDAIGHSYDVFGFYANPKSVKKELFDFALQKEITSEGHTWLLSTDIEYIAVRDTEIKTVSIRTKDAYSSELAASVKLCGSYGGFSASVESDFSESISDETDSTYTSVRTNVNKWKLSLKHTVEELRSKLKPALKEALASMKAVELLSTYGTHYMAEVLVGGRADYVATTKNSAFSSDTKISIVAESSFKSVAGMKVSAEQKQLIEKFQENSSTSLYAIGGSALSSITNTATYNAWLSSIDTRPVFCGFTRDSLRPIWELAESPRRREILRTATQTFIPSGITRNAIVGVDIIVSDNYSVNPPYGYTRRSYDLNRNAKGKYIFLCYKQQKISVAGSPADPTPITALYVASGDDDNPYVPPGYTKIDKDLNKDHGGKFIYLCYTKDPAAIPNDEDGLPIRGIRVIGSKKVENVVTPYGYTRIEEDLNKGAGGDFIFICFSRHLD

SEQ ID NO: 589 - protein, 373 aa, Huperzia phlegmaria
MAQIESLPQSSDYAMDQIEPLPGSDAIGHSYDVFGFYANPKSVKKELFDFALQKEITLEGHTWLLSTDIVHIAVRDTDINTVSLRTKDAYSTELAASVKVSGSYGSFSASVESDFSQSISDETDSTYTSVRTNVNKWKLSLKPTVEELRSMLTPSFKEALASMNSEELFTTYGTHYLSEVLVGGRADYVATTKTSAFSSDTKISVVAESSFKSVAGMEVSAEYKELIKKFQENSSTRLYALGGSALSSITDTASYNAWFSSIDTRPVFCGFTRDSLRPIWELAESPQRREILRKAAQTFIPPEITRNAIVGVDIIMSDNYWVNPPYGYTKIDYDLNRNAKGKYIFLCYNQQKIFVGIPCGSDAHHCLVRGFWR

SEQ ID NO: 590 - protein, 319 aa, Huperzia nummulariifolia (Blume)
MLKPSFKEALASMNSEELFTTYGTHYLSEVLVGGRADYVATTQTSAFSSDIQISVVAESSFKSVAGMDVSSKYKELIQIFQENSFTSLYAIGGSALSSITDTDTYNAWLSSIDTLPVFCGFTCETDTYNAWLSSIDTLPVFCGFTCESLQPIWELAESPQRQEILQKATQTFIPLEIKRNAIVDVDIVVSDNHKVNPPYGFTKVDYDLNNNANGKYIYLCYKQQKISVAGSPADPKPITALDVASGDDDDPDVPPGYTRINSDLNEGAGGKYIYLCYTKDPAAIPSDEDGLPILASALLVTKNSRMWLHLTDSRRLIKI

SEQ ID NO: 591 - protein, 451 aa, Huperzia carriata (Solomon Islands)
MAEIKPLPGSDSIGHSYDVFGFFANLKSVKRQLFDFAPQEEITLEGHNWLLSADIEYTAARDTEIKTISDRTTDAYSTELAASVKVSGSYGYFSASVESDFSQSISDETDSTYTSVRTNVTKWKLNLKPTVEELRSMLTPSFKEALASMDSDELFTTYGTYYLSEVLVGGRADYVATTKTSAFSSDTQIGVVAESSFKSVAGMEVSSQYKELIKKFQENSSTSLYAIGGSAISSITDTATYNKWLSSIDTLPVFCGFTSASLMPIWELAESSERQEILQKATKTFIPPEIRQNAIVDVDIIVSDDSSVNPPDGYTKIDYDLNHNAKGKYIFLCYNQQKISVAGSPADPKPITALYVASGDNNNPYVPPGYTMINRDLNAGAGGNFIYLCYTKDPAEIPSDEDGLPIRGIRVIGNAKFVNVITPYGFTRIDKDLNEGAKGDFIFVCFSRHLD

SEQ ID NO: 592 - protein, 324 aa, Platycerium bifurcatum
MQSDTVMMYSDFTPTPRALIHTSSTLRSRKKSFLRATPVSTDIEYIAVRDTEIKTVSLRTKDAYSSKLAASVKLSGTYGAFSASVEADFSKNISDETDSTYTSVRINVNKWKLSLKHSVEKLRSLLKPALKEALSSMNALELFSMYGTHYMGEVLVGGRADFVATTKTSAFSSETKISAVAESSFNSMAGVKVSAAQKQLINKFQENSSTSLYAIGGSALINKFQENSSTSLYAIGGTALSSITDTTTYTAWLRSIDTNPVFCGFSSDSLRPIWELAEFPLRRGSLNPLSAGRFSEKLQKRLSHAESHEMQSLTWILSRQTIIG

SEQ ID NO: 593 - protein, 315 aa, Huperzia goebelii (Holub)
MLTPSFKEALASMNSEELFTTYGTHYLSEVLVGGRADYVATTKTSAFSSDIQISVVAESSFKSVAGMDVSSKYKELIQIFQENSSTRLYAIGGTALSSITDTTTYNAWLSSIDTRPVFCGFTRDSLRPIWELAESPQRQEILQKATKTFIPLEIRRNAIVDVDIIVSDNCWANPPYGYTKIDYDLNRNAKGKYIFLCYKQQKISVAGSSADPKPITALYVASGDNDNPYIPSGYTKINKDLNEGAKGKFICLCYTKDPAAIPNYQDGLPIRGIRVIGNEKVENVVTPYGFTKINTDLNDGAGGDYIFVCFSRHLD

SEQ ID NO: 594 - protein, 449 aa, Selaginella kraussiana (Variegata)
MSYTSSIVFSFVLAALLFYPFCVQSSNVHIGNGLYLPDTNLMVPINSQYTIFEGDISRFLREEPLGITFNNKVFSRDTESLYSEFSQTFGLNAQYRVVRISVEQSLQHIAGSETNVTALSIDVLTYSKKLSIRNEARTITRIPLREAFLQELRQLPEYPADGDSNWLPYLRFMRKWGSHYVNAVYYGSWFQQWSTASSTMRFTERQFQARACVAVEGVGNKFPSVEACAGVGEQEKRAASSLSMRTRLVVRGGEPRTASMLSSGQRTDELLQQFIKEGLDSTVAVRYQFTPLWTQVLAVYGMNTREGRIASAMEAYYEGFLAFGCPRMTTTNNIAMQRFRRSVSNLYSCERKCEGCSVAADCNRIGNSRICNCFGNSCIRLIEGNPEGRVEVQTTRDDLRQNEGPNRSCQFSGSSCRCVASAESNCVAGYRAIWNQWDALAEKDAVQVM

SEQ ID NO: 595 - protein, 503 aa, Adiantum raddianum (Gracillimum)
MGTCRNRRRTEEDMSVRAGVRDIHYITVQVASMQMQIQAAAIAMTSPVVATIFRTLLVVFCFCAPGSAIGQQQPLVYIGATVYLPGTNLGSAITPLRGIFEGNISRFLVEENYTTVLNTMKFHSSSDSMVRELSTTFGLSGSPTKAVELSLETSLKSLKGSQTNVTSSLAVVESYSKRVFLRNERERAVETIPLRTDFLQELRNLPILPSPTSDDGWGPYRSFLTKWGSHYISTIYSGSWLRQWSVAASSQRYSQRQIEAKACAKLTGVATIPSIQGCAGFSTNEMMSSLNLQTNDEIEVRGGQAATAAAIVTGRTDALVRQFIEEGRTSNVPVRYGFLPIWRPVLDTYTSPSSKEWQVATALEAYFNGFLAFECPRKFLSSRSVILQQFRRKQNGFYECVRTCVGCKSNYDCTLNSAACYCYGESCVIAQPPDGRPQIQRYKDNLSTWDLPNLSCYYSFPYCVCDTKSQEPNCGQDGFIPIWSQDKDSSALSSTTSMDSDVI

SEQ ID NO: 596 - protein, 318 aa, Platycerium bifurcatum
MALIEPLPGSDAIGHSYDVFGFYANPKSVNTQLFDFAPQQEIILEDHKWLLSTDIEYIAVRETEIKTVSLRTKDAYSTELAASVKVSGSYGSFSASVESDFSQSISDETDSTYTSVRTNVNKWKLSLKPTVEELRSMLTPSFKEALASMDSEELFTTYGTHYLSEVLVGGRADYVATTKTSAFSSDIQISVVAECSFKSVAGMEVSSQYKELIKTFQENSSTRLYAIGGTTISSITDKDTYNAWLSSIDTRPVFCGFTYESLQPIWELAESPQRQEILQKATSDSLRPIWELAEFPLRREILRKATQTLIPHEMQLLA

SEQ ID NO: 597 - protein, 303 aa, Platycerium bifurcatum
MNALELFSMYGTHYMGEVLVGGRADFVATTKTSAFSSETKISAVAESSFNSMAGVKVSAAQKQLINKFQENSSTSLYAIGGTAISSITDTDTYNAWLSSIDTCPVFCGFTYESLQPIWELAESPQRQEILQKATKTFISPEIKRNAIVDVDIIVSDNYGVNPPFVLQATEDDLNRNAKGKFIFLCYNQQKISVAGSPADPKPITALYVASGDDDHPYVPPGYTRISSDLNEGAGGKFIYLCYTKDPAAIPSDEDGLPIRGIRVIGNENIDNVVTPYGFTKIDKDLNEGAGGDFIYVCFSRHLD

SEQ ID NO: 598 - protein, 463 aa, Huperzia carinata
MAQIEPLPGSDAMAQIEPLPGSDAIGHSYDVFGFYANPKSVKRELFDFAPQQEITEEGHTWLLSTDIVNTAVRDTEIKTVSLRTKDEYSTELAASVKVSGSYGGFSASVESDFSQSISQETDSTYTSVRTNVTKWKLGLKPTVEELRSMLTPSFKEALASMESEELFTTYGTYYLSEVLVGGRADYVATTKTSAFSSDTQISVVAESSFKSVAGMEVSSQYKELIKKFQENSSTRLYAIGGTALSSITDTATYNAWLSSIDTLPVFCGFTSASLKPIWELAESSQRQEILQKAAQTFIPLEIRRNAIVDVAIIVSDNHLVNPPYGFTKIDFDLNRGAKGKFIYLCYKQQKISVAGSPADPKPITALNVVSSDYHDPSAPSGYTMINTDLNQGAKGKFIYLCYTKDPAAIPSDEDGLPIRGLRVIGNPQVENVVTPYGFTRINKDLNEGAKGEYIYVCFSRHLD

SEQ ID NO: 599 - protein, 578 aa, Selaginella biformis
MADSPLVSVNLRAAVRENGYRMLKSPVFKEQHLERLWKSIDPHYKQKQLWASDSGTPLGDHDDNLESLPGCNIVGCGYNVLHGYYADARSCLQDLFDLESSGMSKVSVGAKEFAKPNVVIMRPKYATSTYVETGKTIEQYNSSISSVGAKEFAKPNVVIMRPKYATSTYVETGKTIEQYNSSISSKTQLQGEYNFFSASVEVDIGINQAENLQNEFTKVQSDVETFVLQLDVGHEKMLKPQVKKDIDEMKDLDNLYDTYGTHYLRTIVMGGHATYTSSTNKNEFSSEFELGVVASMSFKALVGSISASEEAKYTSSIQSFNESSTTKIETSGGDPGLGGTYFAKHVDEWINSVKDYMTLADFVHGETVPLWRLASTAEREDALQKHYLDYCKRKQTTYTLSGIPPLRVRRVPVTEGFQPYYHVGTPDIGGNWSYFGQTNGYGYTIVVQETQPGSGVLGRIAKWEKIGDVYGCSVWRGVPADPVDYVVLSDFTHRGSNAPTAEETVGIMAVHRSCLISIGSGSGLDNPSWDFCMWGVDPVYNPKVSLLEDLKLYVMVIFSGQGTREMYRLLASELQVED

SEQ ID NO: 600 - protein, 448 aa, Huperzia tetratoides
MAHIEPLPGSDAIGHSYDVFGFYANPKSVQRQLFDFAPQQEITSEGHAWLLSTDIESIAVRDTEIKTVSLRTKDEYSRELAASVKVNGSYGGFSASVESDFSQSIAQETDSTYTSVRTNVNKWKLSVKPTVEELRSMLTPSFKEALASTDPVELFTTYGTHYLIEVLVGGRADYVATTKTSAFSSDTQLSAAAEMSFKSVAGMEVSAQDKELIKKFQENSSTRLYAIGGTALSSITDTATYDAWLSSIDTRPVFCGFTTDSLKPIWELAESPERREVLQKATETFIPPEITRNAIVGVDIVVSDNDAVNPPYGYTKINYDLNSNAKGKYIFLCYKQQKISVAGSPADPKPITALYVASGDNNHPSIPSGYTKINVDLNQGSGGKYIYLCYTKDPASDEDGLPIRGIRVIGSPNSGDVVTPYGFTRINKDLNEGAKGDFIYVCFSRHLD

SEQ ID NO: 601 - protein, 262 aa, Huperzia carinata
MAQIEPLPGSDAMAQIEPLPGSDAIGHSYDVFGFYANPKSVKRELFDFAPQQEITEEGHTWLLSTDIVNTAVRDTEIKTVSLRTKDEYSTELAASVKVSGSYGGFSASVESDFSQSISQETDSTYTSVRTNVTKWKLGLKPTVEELRSMLTPSFKEALASMESEELFTTYGTYYLSEVLVGGRADYVATTKISEFSSYTKISIVAESSFKSVAGMKVSAEQKQLIENFQENSSTSLYAIGGSALSSIKILPLTTHGSVTPFD

SEQ ID NO: 602 - protein, 294 aa, Huperzia salvinioides
MARIEPLPGSDAIGHSYDVFGFYANPKSVKKELFDFALQKEITLEGHIWLLSTDIEYIAVRDTEIKTVSLRTKDAYSSELAASVKLSGSYGGFSASVETDFSQSISDETDSTYTSVRTNMNKWKLSEAQCGKAALPVEACVEGGIGEYESSGAVEYLRDNYMGEVLVGGRGDYVATTKTSAFSSDTKISIVAESSFKSVAGMKVSAEQKQLIEKFQENRSTSLYAIGGTALSSITDTATYNAWLTSIDTRPVFCGFTRESLQPIWELAESPQRREVLRKAAQTYIPPHEMPSLA

SEQ ID NO: 603 - protein, 451 aa, Huperzia carinata
MACIEPLPGSDAIGHSYDVFGFYANPKSVKRELFDFAPQQEITEEGHTWLLSTDIVNTAVRDTEIKTVSLRTKDEYSTELAASVKVSGSYGGFSASVESDFSQSISQETDSTYTSVRTNVTKWKLGLKPTVEELRSMLTPSFKEALASMESEELFTTYGTYYLSEVLVGGRADYVATTKTSAFSSDTQISVVAESSFKSVAGMEVSSQYKELIKKFQENSSTRLYAIGGTALSSITDTATYNAWLSSIDTLPVFCGFTSASLKPIWELAESSQRQEILQKAAQTFIPLEIRRNAIVDVAIIVSDNHLVNPPYGFTKIDFDLNRGAKGKFIYLCYKQQKISVAGSPTDPKPITDLYVASGDNKDPSVPRGYTKINRDLNDGAGGKYIYLCYTKDPAEIPDDEDGLPIRGIRVIGKTKAIDVITPYGFTRIDTDLNDGAGGDYIFVCFSRHLD

SEQ ID NO: 604 - protein, 257 aa, Platycerium bifurcatum
MLTPSFKEALASMDSEELFTTYGTHYLSEVLVGGRADYVATTKTSAFSSDIQISVVAECSFKSVAGMEVSSQYKELIKTFQENSSTSLYAIGGTTISSITDKDTYNAWLSSIDTRPVFCGFTYESLQPIWELAESPQRQEILQKATKTFISPEIKRNAIVDVDIIVSDNYGVNPPYGYTKIDYDLSPEIKRNAIVDVDIIVSDNYGVNPPYGYTKIDYDLNRNAKIYLFVLQSTEDISSRIPCGSEAHHCFVRGFWR

SEQ ID NO: 605 - protein, 503 aa, Selaginella pallescens
MAEHSEQKGSLILESLEEGRKLPGTEILGSGYDVLGGYYADPRSCLVNLFDFPAEVETVQIGNQEFSKSTGIVYHSSIGTDLDMSSGKSIQEYTKEINSKTKLEGNYSFFSASIEADIGIKSAQKSENEFSKAQYNVKFFTLQLPPHHSKMLKPQIKDDIDNMSDLVRLFDMYGTYYLAGILMGGAASSTSSTSTSTFNSSLDVSVAAKIAFQWSIGGLSAEEQAEYKQQVKSFNESSETTVRTTGGKPGIKFPAEIGEWSDSILDYMAFVDYLGSRSLVGIWELASTRERQDELHKFYHKYCRFRQMQIIPLLRARVVPFAQMSRLGSNLAAWAPDEPDMPFGWYYLGQVWYHTGPYKMVPAVFALIVQEMEPGMLADVRSWSKVGDGPEGSSFWHGSSASEDHLVLGNFFHDKSNPPTALESFGIKAVHMDCLVPANLGYYHNMPGSDVLLGLKVWPVVAADDTAIPMDKLQSCFSLDGPGPFYLLKKSAVELDRGWWVLE

SEQ ID NO: 606 - protein, 528 aa, Selaginella victoriae
MDLDAAPMDQHTLPGCEILGSGYDVLNGYYADSRSCLTNLFDFPANYETVKVGSQSFTKPVEISYHSSTGTNLYTDAGNTITEFESSINSRTQIEGSYTFFSSSIDVEIGESSAKSIDNAFSKVNYRVDQYTLQLPPKASEYLKKYVQEDIDKMTDLTRLFDTYGTHYLAKLIMGGVANYSATTKKSKFTSNYDLKVVATMSYKSAVGSLSVSEENTYKQSISSFNQSSTISLKTKGGDPGLGGEKFPEHADEWAKSVENYLSFIDFLGVNSLVGIWELASTAKRMAEIKAYYGTYCEIRQKHYFLDDGPLLRARIVQLSKVQFTDAGSGAKRDLSVCIPDIGGGWYYLGQVALPGGGATGNTLVIQEKYPGSGVLLDVDHWEKVWDDHGSKKPKDYSLWRGVAANPVDYVVLSDFFRGGVSSQYEPTAEETVGIKAVAGACVVRGKVGEMVWNDEKSKASDDGSVWSIVPADNTAINTSSIKPYYVSEKSHKSPSGACVVRGKVGEMVWNDATMDPFGALFQRITRP

SEQ ID NO: 607 - protein, 315 aa, Huperzia carriata (Solomon Islands)
MLTPLFKEDLASMNSEELFTTYGTHYLSDVLVGGRTDYVATTKTSRFSSDSEISVAAESAFKSVAGMEVSSQYKELIKKFQENSSTSLYAIGGSAISSITDTATYNKWLSSIDTLPVFCGFTSASLMPIWELAESPQRQEILKKATQTFIPLEIRRNAIVEVAIIVSSDHQVKPLYGFTKIDFDLNSGAKGKFIYLCYKQQKISVAGSPADPKPITALYVASGDNNNPYVPPGYTMINRDLNAGAGGNFIYLCYTKDPAEIPSDEDGLPIRGIRVIGNAKFVNVITPYGFTRIDKDLNEGAKGDFIFVCFSRHLD

SEQ ID NO: 608 - protein, 315 aa, Huperzia carriata (Solomon Islands)
MLTPSFKEALASMDSDELFTTYGTYYLSEVLVGGRADYVATTKTSAFSSDTQIGVVAESSFKSVAGMEVSSQYKELIKKFQENSSTSLYAIGGSAISSITDTATYNKWLSSIDTLPVFCGFTSASLMPIWELAESPQRQEILKKATQTFIPLEIRRNAIVEVAIIVSSDHQVKPLYGFTKIDFDLNSGAKGKFIYLCYKQQKISVAGSPADPKPITALYVASGDNNNPYVPPGYTMINRDLNAGAGGNFIYLCYTKDPAEIPSDEDGLPIRGIRVIGNEKVENVVTPYGFTKIDKDLNEGAGGDFIFVCFSRHLD

SEQ ID NO: 609 - protein, 415 aa, Selaginella victoriae
MVDRAEFMQSSTQVFQFFGISFGMSFPIKKLMFSFDTSFQAISGGRQEIKAAVLQVESYSRRSFFRNNLALQLNPTLVQDLNSLPEPPTITAHRHDWRNHENFLRKWGSHYMTEVRYGSWMRQFTSAASTETYSEIEMKANACARLFGGKLSKIGACAGITQQQINANSNLRVRLTTEVRGGNAQTAAQLRRIPVQESVIESFKVEGRNSNEAVVYHFAPIWQAIKARYSVQTRQWRQADALESFYVGFLAFDCPQRILNTGSSSEPTTLLQQFRRRGEKFQCVRHCVGCRRSKDCNFHTTGNGAPGCYCYGNSCLVAQGAESRIAIQTRRDNLPRNVNPNRSCQQSGVSGCKCDRNPRENGCGADNMIEIWPQTPRNPNPGTLNAYEETGVDIVDDMIMVQEDEVVYDEMKNIM

SEQ ID NO: 610 - protein, 444 aa, Platycerium bifurcatum
MQSDTVMMYSDFTPTPRALIHTSSTLRSRKKSFLRATPVSTDIEYIAVRDTEIKTVSLRTKDAYSSKLAASVKLSGSYGSFSASVESDFSQSISDETDFTYTSVRTNVNKWKLSLKPTVEELRSMLTPSFKEALASMDSEELFTTYGTHYLSEVLVGGRADYVATTKTSAFSSDIQISVVAECSFKSVAGMDVSAKYKELIQKFQENSSTSLYAIGGTAISSITDTDTYNAWLSSIDTCPVFCGFTYESLQPIWELAESPQRQEILQKATKTFISPEIKRNAIVDVDIIVSDNYGVNPPFVLQATEDDLNRNAKGKFIFLCYNQQKISVAGSPADPKPITALYVASGDEPITALNVVSSDYHDPSGPSGYTMIYTDLNQGVGGKFIYLCYTKRSSIRSSRLYQDQQRSERGCGGQIYLSMLHKRSGCNTQRRGWTAHTWHPRYW

SEQ ID NO: 611 - protein, 251 aa, Huperzia carinata
MAGMESSSEYKELIQKFQENSSTRLYAIGGTALSSITDTATYNAWLSSIDTLPVFCGFTSASLKPIWELAESSQRQEILQKAAQTFIPLEIRRNAIVDVAIIVSDNHLVNPPYGFTKIDFDLNRGAKGKFIYLCYKQQKISVAGSPTDPKPITDLYVASGDDDNPYVPAGYTKIDKDLNKDAGGKFIYLCYTKDPAAIPSDEDGLPIRGLRVIGNPQVENVVTPYGFTRINKDLNEGAKGEYIYVCFSRRQ

SEQ ID NO: 612 - protein, 423 aa, Huperzia carinata
MAQIEPLPGSDAIGHSYDVFGFYANPKSVKRELFDFAPQQEITEEGHTWLLSTDIVNTAVRDTEIKTVSLRTKDEYSTELAASVKVSGSYGGFSASVESDFSQSISQETDSTYTSVRTNVTKWKLGLKPTVEELRSMLTPSFKEALASMESEELFTTYGTYYLSEVLVGGRADYVATTKTSAFSSDTQISVVAESSFKSVAGMEVSSQYKELIKKFQENSSTRLYAIGGTALSSITDTATYNAWLSSIDTLPVFCGFTSASLKPIWELAESSQRQEILQKAAQTFIPLEIRRNAIVDVAIIVSDNHLVNPPYGFTKIDFDLNRGAKGKFIYLCYKQQKISVAGSPADPKPITALNVVSSDYHDPSAPSGYTMINTDLNQGAKGKFIYLCYTKDPAASLLHKRSGCNTQRRGWTAHTWHPRYRQ

SEQ ID NO: 613 - protein, 450 aa, Selaginella victoriae
MVSHSSLVLWCSFLVLAYYIGYTSCVQNLGHGVYLPDTNLVSNSNPNAPQLIFRENVADFVTNESFSRMVDRAEFMQSSTQVFQFFGISFGMSFPIKKLMFSFDTSFQAISGGRQEIKAAVLQVESYSRRSFFRNNLALQLNPTLVQDLNSLPEPPTITAHRHDWRNHENFLRKWGSHYMTEVRYGSWMRQFTSAASTETYSEIEMKANACARLFGGKLSKIGACAGITQQQINANSNLRVRLTTEVRGGNAQTAAQLRRIPVQESVIESFKVEGRNSNEAVVYHFAPIWQAIKARYSVQTRQWRQADALESFYVGFLAFDCPQRILNTGSSSEPTTLLQQFRRRGEKFQCVRHCVGCRRSKDCNFHTTGNGAPGCYCYGNSCLVAQGAESRIAIQTRRDNLPRNVNPNRSCQQSGVSGCKCDRNPRENGCGADNMIEIWPQTPRNPNPE

SEQ ID NO: 614 - protein, 409 aa, Selaginella pallescens
MVPINSQYTIFEGDISRFLREEPLGITFNNKVFSRDTESLYREFSQTFGLNAQYRVVQISVEQSLQHIAGSETNVTALSIDVLTYSKKLSIRNEARTITRIPLREAFLQELRQLPEYPADGDNNWLPYLRFMRKWGSHYVNAVYYGSWFQQWSTASSTMRFTERQFQARACVAVEGVGNKFPSVEACAGVGEQEKRAASSLSMRTRLVVRGGEPRTASMLSSGQRTDELLQQFIEEGLDSTVAVRYEFTPLWTQVLADYGMNTREGRIASAMEAYYEGFLAFGCPRMTTTNNIAMQRFRRSVSNLYSCERKCEGCSVAADCNRIGNSQICKCFGNSCIRLIEDNPEDRVEVQTTRDDLRQNEGPNRSCQFSGSSCRCVASAESNCVAGYRAIWNQWDALAEKDAVHAIG

SEQ ID NO: 615 - protein, 417 aa, Platycerium bifurcatum
MALIEPLPGSDAIGHSYDVFGFYANPKSVNTQLFDFAPQQEIILEDHKWLLSTDIEYIAVRETEIKTVSLRTKDAYSTELAASVKVSGSYGSFSASVESDFSQSISDETDSTYTSGFSASVESDFSQSISDETDSTYTSVRTNVNKWKLSLKPTVEELRSMLTPSFKEALASMDSEELFTTYGTHYLSEVLVGGRADYVATTKTSAFSSDIQISVVAECSFKSVAGMEVSSQYKELIKTFQENSSTRLYAIGGTTISSITDKDTYNAWLSSIDTRPVFCGFTYESLQPIWELAESPQRQEILQKATKTFISPEIKRNAIVDVDIIVSDNYGVNPPYGYTKIDYDLSPEIKRNAIVDVDIIVSDNYGVNPPYGYTKIDYDLNRNAKGKYIFLCYTEDISSRIPCGSEAHHCFVRGFWR

SEQ ID NO: 616 - protein, 258 aa, Huperzia goebelii (Holub)
MAQIEPLPGSDAIGHSYDVFGFFANPKSVKRQLFNFASQEEITLEGHSWLLSTDIEYTAVRDTDIKTVSYRTKDAYSTELAASVKVSGSYGSFSASVESDFSQSISDETDSTYTSVRTNVNKWKLSLKPTVGELRSLLTPSFKEALASMDAEELFTTYGTHYLSEVLVGGRADYVATTKTSAFSSDTEIKLAAESSFKSMAGMGNSSQYKELIQKFQENSSILLYAIGGTALSSITDTTTYNAWLSSIDTRPVFCGFT

SEQ ID NO: 617 - protein, 597 aa, Selaginella kraussiana (Variegata)
MVISGAETKAVAAIQALGCGFDVTLDHKLEYAKSRLVDLDPETRTVVVPGNIIVEDVSMDIKVDKGENTRLRTDALDFHQMSERFNQGCGIAGKMPLGLLTAMYDLKGPWQLDALSTKCLAFDGYIAVLYEMKVAKSLISLLREVKDAVPSNWQPLELTRFIEKYGTHVITGVKVGGKDVIYLRQSQSSKLSAVDIQRYLESLAEQRFADGSGRRFKVFKKGAKTKVADPFAMIDRSKVINNFSSISISDDNVEVKFKRRGGLDSIRDHGPWLLSVPNAPEVVSMSFVPITSLLAGVPGTGFLTHAINLYLRYKPPIDELQFFLEYQVPRQWSPTLDASNQTSSSNLPALQFSPMGPKLHVSTDEATAGKRPVTGLRLYIQGKKLNRLTIHLQHLSSLPKILESHWGASNTYNDAPQWKSCEDEPRWLEPVQWKSFSHVNTAPVEYVEQCIGDETGDFIVTGAQLEVSDSRTRPVLSLRLQFTRVPGCSIRRSVWDNMPAMQKSSSGFFSQFGFSNVSNAQHKQQQSQQQRFVQNSAVFSGGPSRSVHGSRLLKFVDVSEMSKGVQDEPGHWIVTGGKLDVEGGKICLKVKYSLLKY

SEQ ID NO: 618 - protein, 410 aa, Asplenium nidus var plicatum
MRSTSNTQRFQRTSDQVFRELGTTFSLSFPIKVLRLSFGATFRSIASSQTNVASALILVESYSRRLLILNEQRSIQQIPLRADFLQELRNLPEPPTSITAAAQWASYRQFLLRWGSHYASEVYYGSWLRTWATAASTKSYTQRQITAKGCADLTGSSRIPIIGGCRDIAISEMTAASRLDINVQIEIRGGESGTRAELAVRRTDRLIQDFIREGQVNDEADVKYGLAPIWRPVLARYHSATSKEWRVATALEAYYNGFLSFPCPYNIENGIVLQQFRRITTGTYRCVRPCQGCRDFHDCNLRQFGCYCYGSTCIAAGGDDNRAWIQRWFTGSRYYPPSSSCYYQFPSCRCNYGWREANCGTDRTITIWDQTKVNVGVHGNETVVEALSIENNVWVSPANSSNIAEAMSFE

SEQ ID NO: 619 - protein, 354 aa, Ophioglossum pendulum
MEPNKGGVPPMKNVAKPSTKRLIPSSIAASSQTSANALTEPLPGSDAIGQSYDAFGFFANPRSIMKELFEFSPQEEIVVEGNTWLLSSDFVYTAIRDTETSTVSRRTKDDYSKELAVKVKLSGSYGFFSASVESDFSQSISDVTDTTYTSVRTHVNKWRLSLKDDVGALRSKLLPGVKQALATMDATQLFDTFGTHYVSEVLVGGRADYVATTKTSAFSSSTSISVAAEASFQSIAGGEVSPESKVLAETLRENSSTAVAEASFKSIASGEVSPEYKELVQTLRENSSTRLYALGGSALPNITDPATYNAWLESIDTIPVFCGFTQNSLKPISELADSAQRRTLWPKPPKAIRS

SEQ ID NO: 620 - protein, 262 aa, Polystichum lepidocaulon
MASSSPPFAFMGLLMMLLCAGSNGQDQLVYIGRTLYLPTTNLGDSITPVRGIFEGNLSRFLVEEDYIRITNTQRFQASSQSILAELSTTFGLSGSALKTVELSLETSFRVLTGSEANVTSSVVVVESYSKRTFLRPEVQRSVVTIPLREDFLQELRSLPELASPTPDSEWGSYRNFLLKWGSHYISAIYYGSWLRQWSVAESSRQYSQREIQAKACAKLTGAISIPSIDGCAGFSTEEMNRALSLQTNDVIEVRGGSAQTPS

SEQ ID NO: 621 - protein, 270 aa, Huperzia phlegmaria
MLTPSFKEALASMNSEELFTTYGTHYLSEVLVGGRADYVATTKTSAFSSDTQIGDVAESSFKSVAGMEVSSHYLSEVLVGGRADYVATTKTSAFSSDTKISVVAESSFKSVAGMEVSAEYKELIKKFQENSSTRLYALGGSALSSITDTASYNAWFSSIDTRPVFCGFTHESLQPIWELAESPQRQEILQKATKTFIPPEIRRNAIVDVDIIVSDNYWVNPPYGYTKIDYDLNRNAKGKYIFLCYNQQKIFVGIPCGSDAHHCLVRGFWR

SEQ ID NO: 622 - protein, 310 aa, Selaginella kraussiana (Variegata)
MTDAYEWMKTLPGCDTIGSGYDILNGYYADARSCLENLFDFSSVDNEIVVVSGTQYTKPKVLTYHSSIQTDLHMSEGESIMEYNRSVNMKTKLEGEYNFFSASVELDIGKASAENQENSFSRIQENVSYFTLQLPSSYCDLLIKPRMKKDIDEMTDLTKLFKTYGTHYVSGMIIGGSATYTASTNKTTFKSKLGLGYVAKMSYQALVGGLSAQLESQYGEDIKAFNQASSTKLMAKGGDPAYGGHDFPKHTKTTSPSWTSSATAVSPGSGIWRPRTPVPSRLKATTPSTARRVRRTSIWSPPSSELRSFP

SEQ ID NO: 623 - protein, 286 aa, Platycerium bifurcatum
MALIEPLPGSDAIGHSYDVFGFYANPKSVNTQLFDFAPQQEIILEDHKWLLSTDIEYIAVRETEIKTVSLRTKDAYSTELAASVKVSGSYGSFSASVESDFSQSISDETDSTYTSVRTNVNKWKLSLKPTVEELRSMLTPSFKEALASMDSEELFTTYGTHYLSEVLVGGRADYVATTKTSAFSSDIQISVVAECSFKSVAGMEVSSQYKELIKTFQENSSTRLYAIGGTTISSITDKDTYNAWLSSIDTRPVFCGFTYESLQPIWELAESPQRQEILQKATSGKS

SEQ ID NO: 624 - protein, 252 aa, Huperzia nummarifolia
MAGVKVSAAQKQLINKFQENSSTRLYAIGGSALSSITDTATYNAWLSSIDTRPVFCGFTRDSLRPIWELAESPQRREILRKATETFIPRGITRNAIVDVDIITSDNYWVNPPYGYKKIDYDLNRNAKGKYIFLCYKQQKISVAGSPADPKPITALYVTSGDDYNPYVPPGYTKIDKDLNKDAGGKFIYLCYTKDPAAIPNDEDGLPIRGIRVIGNEKLENVVTPYGFTRIDKDLNKDAKGDYIFVCFSRHLD

SEQ ID NO: 625 - protein, 275 aa, Polystichum lepidocaulon
MASSSPPFAFMGLLMMLLCAGSNGQDQLVYIGRTLYLPTTNLGDSITPVRGIFEGNLSRFLVEEDYIRITNTQRFQASSQSILAELSTTFGLSGSALKTVELSLETSFRVLTGSEANVTSSVVVVESYSKRTFLRPEVQRSVVTIPLREDFLQELRSLPELASPTPDSEWGSYRNFLLKWGSHYISAIYYGSWLRQWSVAESSRQYSQREIQAKACAKLTGAISIPSIDGCAGFSTEEMNRALSLQTNDVIEVRGGSAPAACRCGMSSCPSGGLF

SEQ ID NO: 626 - protein, 450 aa, Selaginella biformis
MASLAVFFFVLFALYACAVAQNVHFGFGVYLPGTDLGSPLRTLRSIFNDANNLLVEKYTHAVNNRAHTSNNEQLYKSFGVTFGMSVPVKVLQLNFEASFNKISGSKTSVKTASVFVETYNQKISLRNHARAIQTLQLNPDFLRDLRNLPEPPNSDSAWGPYRSFFNKWGTHYVSETFHGSWLRQWTVASSTETFTERQMQAKACAKLTGLKGIVPNLGGCAGISLEEMRSAERINTQDTREARGGSPATVSQLLSGSVTDDLIRKFIEEGATSKEAVRYGFVPVWMPVLAQYMSSTSKEWRVATALQAYYEGFLAFSCPVNRLNTPSTVLQQFRRLSNGKYQCVRQCQGCRLDKDCNVGTSGASTGCYCYGGSCINALGPDGRAQVQQKKDNLPRNVLPNRSCEYSFPQCRCNTKSKEPNCGADNMIPIWDQDRDTFQSLDSNILLYDEE

SEQ ID NO: 627 - protein, 500 aa, Selaginella victoriae (LW10887)
MDQHTLPGCEILGSGYDVLNGYYADSRSCLTNLFDFPANYETVKVGSQSFTKPVEISYHSSTGTNLYTDAGNTITEFESSINSRTQIEGSYTFFSSSIDVEIGESSAKSIDNAFSKVNYRVDQYTLQLPPKASEYLKKYVQEDIDKMTDLTRLFDTYGTHYLAKLIMGGVANYSATTKKSKFTSNYDLKVVATMSYKSAVGSLSVSEENTYKQSISSFNQSSTISLKTKGGDPGLGGEKFPEHADEWAKSVEYLSFIDFLGVNSLVGIWELASTAKRMAEIKAYYGTYCEIRQKHYFLDDGPLLRARIVQLSKVQFTDAGSGAKRDLSVCIPDIGGGWYYLGQVALPGGGATGNTLVIQEKYPGSGVLLDVDHWEKVWDDHGSKKPKDYSLWRGVAANPVDYVVLSDFFRGGVSSQYEPTAEETVGIKAVAQACVVRGKVGEMVWNDEKSKASDDGSVWSIVPADNTAINTSSIKPYYVSEKSHKSPSRLVYVLKKTAVE

SEQ ID NO: 628 - protein, 337 aa, Huperzia phlegmaria
MARIEPLPGSDAIGHSYDVFGFYANPKSVKKELFDFALQKEITLEGHTWLLSTDIVHIAVRDTDINTVSLRTKDAYSTELAASVKVSGSYGSFSASVESDFSQSISDETDSLSGSYGSFSASVESDFSQSISDETDSTYTSVRTNVNKWKLSLKHTVEELRSKLKPALKEALANMKEVELLSTYGTHYMGEVLVGGRADYVATTKTSAFSSLGTEVEELRSILTPSFKEALASMNSEELFTTYGTHYLSEVLVGGRADYVATTKTSAFSSDTKISVVAESSFKSVAGMEVSAEYKELIKKSTKISTVAESSFKSMAGMKVSATHNQLIQTFQENSST

SEQ ID NO: 629 - protein, 315 aa, Huperzia goebelii (Holub)
MLTPSFKEALASMNSEELFTTYGTHYLSEVLVGGRADYVATTKTSAFSSDIQISVVAESSFKSVAGMDVSSKYKELIQIFQENSSTRLYAIGGTALSSITDTTTYNAWLSSIDTRPVFCGFTRDSLRPIWELAESPQRQEILQKATKTFIPLEIRRNAIVDVDIIVSDNCWANPPYGYTKIDYDLNRNAKGKYIFLCYNQQKISVAGSPADPKPITGLNVVSSDYPNPSVPSGYTMINTDLNQGAGGKFICLCYTKDPAAIPNYQDGLPIRGIRVIGNEKVENVVTPYGFTKINTDLNEGAKGDYIYVCFSRHLD

SEQ ID NO: 630 - protein, 327 aa, Huperzia nummulariifolia (Blume)
MRSKLKSDLKEALASMKVCVEGGIGQYESIGVVESVRNKYMGYRYVFVGGRTGQLYVQGVIGRSCSADYVATTKTSAFSSSTKISTVAESSFKSMAGMKVSATHDQLIQTFQENSSTSLYAIGGSALSSITDTDTYNAWLSSIDTLPVFCGFTCESLQPIWELAESPQRQEILQKATQTFIPLEIRRNAIVEVDIIVSDNHLVNPPYGYTKIDYDLNRNAEGKYIFLCYNQQKISVAGSPADPKPITALDVASGDDDDPDVPPGYTRINSDLNEGAGGKYIYLCYTKDPAAIPSDEDGLPILASALLVTKNSRMWLHLTDSRRLIKI

SEQ ID NO: 631 - protein, 358 aa, Platycerium bifurcatum
MALIEPLPGSDAIGHSYDVFGFYANPKSVNTQLFDFAPQQEIILEDHKWLLSTDIEYIAVRETEIKTVSLRTKDAYSTELAASVKVSGSYGSFSASVESDFSQSISDETDSTYTSVRTNVNKWKLSLKPTVEELRSMLTPSFKEALASMDSEELFTTYGTHYLSEVLVGGRADYVATTKTSAFSSDIQISVVAECSFKSVAGMEVSSQYKELIKTFQENSSTRLYAIGGTTISSITDKDTYNAWLSSIDTRPVFCGFTYESLQPIWELAESPQRQEILQKATKTFISPEIKRNAIVDVDIIVSDNYGVNPPYGYTKIDYDLNRNAKGKYIFLCYTEDISSRIPCGSEAHHCFVRGFWR

SEQ ID NO: 632 - protein, 287 aa, Platycerium bifurcatum
MQSDTVMMYSDFTPTPRALIHTSSTLRSRKKSFLRATPVSTDIEYIAVRDTEIKTVSLRTKDAYSSKLAASVKLSGSYGSFSASVESDFSQSISDETDFTYTSVRTNVNKWKLSLKPTVEELRSMLTPSFKEALASMDSEELFTTYGTHYLSEVLVGGRADYVATTKTSAFSSDIQISVVAECSFKSVAGMDVSAKYKELIQKFQENSSTSLYAIGGTAISSITDTDTYNAWLSSIDTCPVFCGFTYESLQPIWELAESPQRQEILQKATQTFIPLRPKSNEMQSST

SEQ ID NO: 633 - protein, 473 aa, Selaginella victoriae (LW10887)
MDQHTLPGCEILGSGYDVLNGYYADSRSCLTNLFDFPANYETVKVGSQSFTKPVEISYHSSTGTNLYTDAGNTITEFESSINSRTQIEGSYTFFSSSIDVEIGESSAKSIDNAFSKVNYRVDQYTLQLPPKASEYLKKYVQEDIDKMTDLTRLFDTYGTHYLAKLIMGGVANYSATTKKSKFTSNYDLKVVATMSYKSAVGSLSVSEENTYKQSISSFNQSSTISLKTKGGDPGLGGEKFPEHADEWAKSVESFIDFLGVNSLVGIWELASTAKRMAEIKAYYGTYCEIRLRQKHYFLDDGPLLRARIVQLSKVQFTDAGSGAKRDLSVCIPDIGGGWYYLGQVALPGGGATGNTLVIQEKYPGSGVLLDVDHWEKVWDDHGSKKPKDYSLWRGVAANPVDYVVLSDFFRGGVSSQYELLVLRPLPKHVWYVARWVRWYGTMKKARPATMDPFGAYDATMDPFGALFQRITRP

SEQ ID NO: 634 - protein, 290 aa, Huperzia nummulariifolia
MKEVELLSTYGTHYMGEVLVGGRADYVAITKTSAFSSETKISAVAESSFNSMAGVKVSAAQKQLINKFQENSSTRPYAIGGTRTLQHKDTATYNAWLSSIDTVPSSADSLATVLGPSGSSLNPLSAGRFSEKLQKRLSPVRLIPFPSSVDSLAQVLGPSGNSLNPLSARRSSKRLSSIDTLPVFCGFTSASLRPIWELAESSQRQEILQKATKTFISPEIKRNAIVDVDIIVSDNYGVNPPYGYTKIDYDLEPQCQGQIYLFVLQSTEDISSRIPCGSEAHHCFVRGFWR

SEQ ID NO: 635 - protein, 523 aa, Selaginella biformis
MIMTISSHFPVAALWAAATLWKSIDPHYKQKQLWASDSGTPLGDHDDNLESLPGCNIVGCGYNVLHGYYADARSCLQDLFDLESSGMSKVSVGAKEFAKPNVVIMRPKYATSTYVETGKTIEQYNSSISSKTQLQGEYNFFSASVEVDIGIKQAESREYEFSKVQSDVETFVLQLDVDHEKMLKPQVKKDIDEMKDLDNLYDTYGTHYLRTIVMGGHATYTSSTNKNEFSSEFELGVVASMSFKALVGSISASEEAKYTSSIQSFNESSTTKIETSGGDPGLGGTYFAKHVDEWINSVKDYMTLADFVHGETVPLWRLASTAEREDALQKHYLDYCKRKQTTYTLSGIPPLRVRRVPVTEGFQPYYHVGTPDIGGNWSYFGQTNGYGYTIVVQETQPGSGVLGRIAKWEKIGDVYGCSVWRGVPADPVDYVVLSDFTHRGSNAPTAEETVGIMAVHRSCLISIGSGSGLDNPSWDFCMWGVDPVYNPKVSLLEDLKLYVMVIFSGQGTREMYRLLASELQVED

SEQ ID NO: 636 - protein, 356 aa, Huperzia nummulariifolia (Blume)
MRSKLKSDLKEALASMKVCVEGGIGQYESIGVVESVRNKYMGYRYVFVGGRTGQLYVQGVIGRSCSADYVATTKTSAFSSSTKISTVAESSFKSMAGMKVSATHDQLIQTFQENSSTKSSFKSVAGMDVSSKYKELIQIFQENSFTSLYAIGGSALSSITDTDTYNAWLSSIDTLPVFCGFTCESLQPIWELAESPQRQEILQKATQTFIPLEIKRNAIVDVDIVVSDNHKVNPPYGFTKVDYDLNNNANGKYIYLCYKQQKISVAGSPADPKPITALDVASGDDDDPDVPPGYTRINSDLNEGAGGKYIYLCYTKDPAAIPSDEDGLPILASALLVTKNSRMWLHLTDSRRLIKI

SEQ ID NO: 637 - protein, 368 aa, Selaginella kraussiana (Variegata)
MVISGAETKAVAAIQALGCGFDVTLDHKLEYAKSRLVDLDPETRTVVVPGNIIVEDVSMDIKVDKGENTRLRTDALDFHQMSERFNQGCGIAGKMPLGLLTAMYDLKGPWQLDALSTKCLAFDGYIAVLYEMKVAKSLISLLREVKDAVPSNWQPLELTRFIEKYGTHVITGVKVGGKDVIYLRQSQSSKLSAVDIQRYLESLAEQRFADGSGRRFKVFKKGAKTKVADPFAMIDRSKVINNFSSISISDDNVEVKFKRRGGLDSIRDHGPWLLSVPNAPEVVSMSFVPITSLLAGVPGTGFLTHAINLYLRYKPPIDELQFFLEYQVPRQWSPTLDASNQTSSSNLPALQFSPMGPKLHVSTDEVRS

SEQ ID NO: 638 - protein, 439 aa, Platycerium bifurcatum
MQSDTVMMYSDFTPTPRALIHTSSTLRSRKKSFLRATPVSTDIEYIAVRDTEIKTVSLRTKDAYSSKLAASVKLSGSYGSFSASVESDFSQSISDETDFTYTSVRTNVNKWKLSLKPTVEELRSMLTPSFKEALASMDSEELFTTYGTHYLSEVLVGGRADYVATTKTSAFSSDIQISVVAECSFKSVAGMDVSAKYKELIQKFQENSSTSLYAIGGTAISSITDTDTYNAWLSSIDTCPVFCGFTYESLQPIWELAESPQRQEILQKATKTFISPEIKRNAIVDVDIIVSDNYGVNPPFVLQATEDDLNRNAKGKFIFLCYNQQKISVAGSPADPKPITALYVASGDDDHPYVPPGYTRISSDLNEGAGGKFIYLCYTKDPAAIPSDEDGLPIRGIRVIGNENIDNVVTPYGFTKIDKDLNEGAGGDFIYVCFSRHLD

SEQ ID NO: 639 - protein, 277 aa, Selaginella victoriae (LW10889)
MIMEGNKSFAETKALSAIGALGCGFDVTLDLKLEYVKSSQSRLIHLDEEETRELVLPGDVICGNVSRDIKFDTGENTRYRSDVLDFHQMSERFNQNLGITGKMPLGLFTSMFEFKGPWQADASSTKSLALDGYFASLYELRVTRSQLTVRQEIKDALPSIWQPLELARFIERFGTHIITGIKIGGKDVIYLRQKHASTLNAAEIQKILEGLAEQRFVDSSEASGSGMRNFKKGARKKVRVAFHISTTEVCLNLTGCRSYRVFGPFKAEQQLRFCFHV

SEQ ID NO: 640 - protein, 315 aa, Huperzia goebelii (Holub)
MLKPSFKEALASMSSEELFTTYGTHYLSEVLVGGRADYVATTKTSAFSSDIQISVVAESSFKSVAGMDVSSKYKELIQIFQENSSTRLYAIGGTALSSITDTTTYNAWLSSIDTRPVFCGFTRDSLRPIWELAESPQRQEILQKATKTFIPLEIRRNAIVDVDIIVSDNCWANPPYGYTKIDYDLNRNAKGKYIFLCYNQQKISVAGSPADPKPITALYVASGDNNNPYVPPGYTMINKDLNAGAGGNFIYLCYTKDPAAIPNYQDGLPIRGIRVIGNEKVENVVTPYGFTKINTDLNDGAGGDYIFVCFSRHLD

SEQ ID NO: 641 - protein, 408 aa, Selaginella pallescens
MVPINSQYTIFEGDISRFLREEPLGITFNNKVFSRDTESLYREFSQTFGLNAQYRVVQISVEQSLQHIAGSETNVTALSIDVLTYSKKLSIRNEARTITRIPLREAFLQELRQLPEYPADGDNNWLPYLRFMRKWGSHYVNAVYYGSWFQQWSTASSTMRFTERQFQARACVAVEGVGNKFPSVEACAGVGEQEKRAASSLSMRTRLVVRGGEPRTASMLSSGQRTDELLQQFIEEGLDSTVAVRYEFTPLWTQVLADYGMNTREGRIASAMEAYYEGFLAFGCPRMTTTNNIAMQRFRRSVSNLYSCERKCEGCSVAADCNRIGNSQICKCFGNSCIRLIEDNPEDRVEVQTTRDDLRQNEGPNRSCQFSGSSCRCVASAESNCVAGYRAIWNQWDALAEKDAVQVM

SEQ ID NO: 642 - protein, 438 aa, Huperzia nummulariifolia (Blume)
MAQIEPLPGSDAIGHSYDVFGFYANPKSVNSQLFDFAPQQEIILEDHKWLLSTDIVYVAVRDTDIKTVSLCTKDEYSTELAASVKLSGSYGSFSASVESDFSQSISDDTDSTYTSVRTNVNKWKLSLKPTVEELRSMLTPSFKEALASMNSEELFTTYGTHYLSEVLVGGRADYVATTQTSAFSSDIQISVVAESSFKSVAGMDVSSKYKELIQIFQENSFTSLYAIGGSALSSITDTDTYNAWLSSIDSASLLPIWELAESPQRQEILQKATQTFIPLEIRRNAIVEVDIIVSDNHLVNPPYGYTKIDYDLNRNAEGKYIFLCYNQQKISVAGSPADPKPITALDVASGDDDDPDVPPGYTRINSDLNEGAGGKYIYLCYTKDPAAIPSDEIRGIRVIGNEKVEYVITPYGFTRINKDLNEGAKGDYIYVCFSRHLD

SEQ ID NO: 643 - protein, 257 aa, Huperzia goebelii (Holub)
MLTPSFKEALASMNSEELFTTYGTHYLSEVLVGGRADYVATTKTSAFSSDIQISVVAESSFKSVAGMDVSSKYKELIQIFQENSSTRLYAIGGTALSSITDTTTYNAWLSSIDTRPVFCGFTRDSLRPIWELAESPQRQEILQKATKTFIPLEIRRNAIVDVDIIVSDNCWANPPYGYTKIDYDLNRNAKGKYIFLCYNQQKISVAGSPADPKPITGLNVVSSDYPNPSVPSGYTMINTDLNQGAGGKFIYLCYTKD

SEQ ID NO: 644 - protein, 439 aa, Asplenium prolongatum x Asplenium antiquum (Kurata)
MWKMVAALIHLLLLLLLSVSAAGVSIGSTIYLPESNLGVSLSPVRNSIFEGNISSFLRSPVLQDIYHNTHQLTSDSVFGELGATFGLSVLPIEVLRFSLGATFRFLASSQANVSSALILVESYSKRQVLLNERSSLQKIPLRNDFLRELRDLPEPPFSVTADEDWVPYREFLIRWGSHYVSEVYYGSWLRTWSTAASSKSYTALQLQAKACAALTGVASIPAIEACANIDLGDMAEASRLDMNVQVEVRGGEPGTRAQLSVHRTDQLIRDFIEEGQKNEDAVVKYSLLPIWRPVLAQYRSPSTKEWKVATALEGYYNGYLAFSCPYIALSDPLKVVLQQFRRAPNGNGTYECVRQCQGCKRDRDCHLRGIGCYCYGRTCVAAPEGRARNQTSPDRLPRNVPPNVNCQYSFPSCKCHSISKEANCGTENLIPIWKQASGR

SEQ ID NO: 645 - protein, 451 aa, Huperzia tetratoides
MAHIEPLPGSDAIGHSYDVFGFYANPKSVQRQLFDFAPQQEITSEGHAWLLSTDIESIAVRDTEIKTVSLRTKDEYSRELAASVKVNGSYGGFSASVESDFSQSIAQETDSTYTSVRTNVNKWKLSVKPTVEELRSMLTPSFKEALASTDPVELFTTYGTHYLIEVLVGGRADYVATTKTSAFSSDTEIKVVAESSFKSLAGAEVSSDYKQLIQKFRENSSTSLYAVGGSALSSITDTATYDAWLSSIDTRPVFCGFTTDSLKPIWELAESPERREVLQKATETFIPPEITRNAIVGVDIVVSDNDAVNPPYGYTKINYDLNSNAKGKYIFLCYKQQKISVAGSPADPKPITALYVASGDNNHPSIPSGYTKINVDLNQGSGGKYIYLCYTKDPAAIPSDEDGLPIRGIRVIGSPNSGDVVTPYGFTRINKDLNEGAKGDFIYVCFSRHLD

SEQ ID NO: 646 - protein, 263 aa, Asplenium nidus var plicatum
MRSTSNTQRFQRTSDQVFRELGTTFSLSFPIKVLRLSFGATRSQTNVSSALILVESYSRRLLILNEQRSIQLIPLRADFLQELRNLPEPPTSITAASQWVSYRDFLLRWGSHYASEVYYGSWLRTWATAASTASYTQRQITAKGCADLTGSSTIPTIGGCRDISLSEMTAASRLDINVQIEVRGGEPGTRAQLTVRRTDQLIQDFIREGQVNDQADGLLQWLLVLPLSLQPPEQYSASAVSPPIHRHIPLCSTLPGLQGVQRL

SEQ ID NO: 647 - protein, 328 aa, Selaginella biformis
MTPVEVDIGIKQAESREYEFSKVQSDVETFVLQLDVDHEKMLKPQVKKDIDEMKDLDNLYDTYGTHYLRTIVMGGHATYTSSTNKNEFSSEFELGVVASMSFKALVGSISASEEAKYTSSIQSFNESSTTKIETSGGDPGLGGTYFAKHVDEWINSVKDYMTLADFVHGETVPLWRLASTAEREDALQKHYLDYCKRKQTTYTLSGIPPLRVRRVPVTEGFQPYYHVGTPDIGGNWSYFGQTNGYGYTIVVQETQPGSGVLGRIAKWEKIGDVYGCSVWRGVPADPVDYVVLSDFTLRLHNCGSGDSARLWCVGAHSQVGKDWRRLWL

SEQ ID NO: 648 - protein, 580 aa, Athyrium filix-femina
MCIEQVKAMAESMSSIERALHALCVVGSDEKDNGVTALGSQMLLKQPEGFSLNNASEASDEMLFAFSSSEESSAFQESVMKNGWNANLELKSKQNPFFQIHVSGSLEENMHHREEEKKEGKQHVAYIMKSLYIPKKSFQIPKHNMRLCDSALASVQEVKNLSDALRFLEAYGSHVSQSWYHLGGVLFEVITVSCAETTSLSDLLHEGARAMKASVTACSGFVGSATVKGSSSSSESHKTSSNKASNFKQSAKRVQALGPTNVRDEDEFRSKLEEGPSSWSIINKGVDRVEDLVAVWNILLQQRQYAETDHAKEILERAAMLLYKAWLNKARSSRRQYRQMIAALIECEERNYYRFQHQLQLHHVDEPEEEVSPLAAALTWVSPAVELPQKLQTVLADQSSLDLSPKVSYFLRSCIAHLSSTSGGENDLRKIVIVINRYGYDQYGNAEFSMYAQHLRSMIEDLNKLNRMEENSTDPQHPIDLNWENTSFCLTIDDCLQIPAEYTYIGDVLVDKPLMKQKQGGGQIQSAHARQLILIDRLRHNLDPFQRPSLEGKPKWKRNSSRANKLAGAQQDPGSRKLCI

SEQ ID NO: 649 - protein, 406 aa, Platycerium bifurcatum
MALIEPLPGSDAIGHSYDVFGFYANPKSVNTQLFDFAPQQEIILEDHKWLLSTDIEYIAVRETEIKTVSLRTKDAYSTELAASVKVSGSYGSFSASVESDFSQSISDETDSTYTSVRTNVNKWKLSLKPTVEELRSMLTPSFKEALASMDSEELFTTYGTHYLSEVLVGGRADYVATTKTSAFSSDIQISVVAECSFKSVAGMEVSSQYKELIKTFQENSSTRLYAIGGTALSSICSFKSVAGMEVSSQYKELIKTFQENSSTRLYAIGGTTISSITDKDTYNAWLSSIDTRPVFCGFTYESLQPIWELAESPQRQEILQKATKTFISPEIRRNAPEIKRNAIVDVDIIVSDNYGVNPPYGYTKIDYDLNRNAKGKYIFLCYTEDISSRIPCGSEAHHCFVRGFWR

SEQ ID NO: 650 - protein, 451 aa, Huperzia squarrosa
MVHIEPLPGSDAIGHSYDVFGFYANPKSVKKELFDFALQKEITSEGHTWLLSTDIEYIAVRDTEIKTVSIRTKDAYSSELAASVKLCGSYGGFSASVESDFSESISDETDSTYTSVRTNVNKWKLSLKHTVEELRSKLKPALKEALASMKAVELLSTYGTHYMAEVLVGGRADYVATTKNSAFSSDTKISIVAESSFKSVAGMKVSAEQKQLIEKFQENSSTSLYAIGGSALSSITNTATYNAWLSSIDTRPVFCGFTRDSLRPIWELAESPRRREILRTATQTFIPSGITRNAIVGVDIIVSDNYSVNPPYGYTRRSYDLNRNAKGKYIFLCYKQQKISVAGSPADPTPITALYVASGDDDNPYVPPGYTKIDKDLNKDHGGKFIYLCYTKDPAAIPNDEDGLPIRGIRVIGSKKVENVVTPYGYTRIEEDLNKGAGGDFIFICFSRHLD

SEQ ID NO: 651 - protein, 364 aa, Selaginella kraussiana (Variegata)
MAEHSEQKGSLILESLEEGRKLPGTEILGSGYDVLGGYYADPRSCLVNLFDFPAEVETVQIGNQEFSKSTGIVYHSSIGTDLDMSSGKSIQEYTKEINSKTKLEGNYSFFSASIEADIGIKSAQKSENEFSKAQYNVKFFTLQLPPHHSKMLKPQIKDDIDNMSDLVRLFDMYGTYYLAGILMGGAASSTSSTSTSTFNSSLDVSVAAKIAFQWSIGGLSAEEQAEYKQQVKSFNESSETTVRTTGGKPGIKFPAEIGEWSDSILDYMAFVDYLGSRSLVGIWELASTRERQDELHKFYHKYCRFRQMQIIPLLRARVVPFAQMSRLGSNLAAWAPDEPDMPFGWYYLGQVWYTRAPTKWSRPS

SEQ ID NO: 652 - protein, 431 aa, Platycerium bifurcatum
MHTPTPTPRALIHTSSTLRSRKKSFLRATPVSTDIEYIAVRDTEIKTVSLRTKDAYSSKLAASVKLSGSYGSFSASVESDFSQSISDETDFTYTSVRTNVNKWKLSLKPTVEELRSMLTPSFKEALASMDSEELFTTYGTHYLSEVLVGGRADYVATTKTSAFSSDIQISVVAECSFKSVAGMDVSAKYKELIQKFQENSSTSLYAIGGTAISSITDTDTYNAWLSSIDTCPVFCGFTYESLQPIWELAESPQRQEILQKATKTFISPEIKRNAIVDVDIIVSDNYGVNPPFVLQATEDDLNRNAKGKFIFLCYNQQKISVAGSPADPKPITALYVASGDDDHPYVPPGYTRISSDLNEGAGGKFIYLCYTKDPAAIPSDEDGLPIRGIRVIGNENIDNVVTPYGFTKIDKDLNEGAGGDFIYVCFSRHLD

SEQ ID NO: 653 - protein, 469 aa, Selaginella biformis
MIMTISSHFPVAALWAAATLWKSIDPHYKQKQLWASDSGTPLGDHDDNLESLPGCNIVGCGYNVLHGYYADARSCLQDLFDLESSGMSKVSVGAKEFAKPNVVIMRPKYATSTYVETGKTIEQYNSSISSKTQLQGEYNFFSASVEVDIGINQAENLQNEFTKVQSDVETFVLQLDVGHEKMLKPQVKKDIDEMKDLDNLYDTYGTHYLRTIVMGGHATYTSSTNKNEFSSEFELGVVASMSFKALVGSISASEEAKYTSSIQSFNESSTTKIETSGGDPGLGGTYFAKHVDEWINSVKDYMTLADFVHGETVPLWRLASTAEREDALQKHYLDYCKRKQTTYTLSGIPPLRVRRVPVTEGFQPYYHVGTPDIGGNWSYFGQTNGYGYTIVVQETQPGSGVLGRIAKWEKIGDVYGCSVWRGVPADPVDYVVLSDFTLRLHNCGSGDSARLWCVGAHSQVGKDWRRLWL

SEQ ID NO: 654 - protein, 344 aa, Huperzia salvinioides
MTRIPLTLQFVNVNKWKLSLKPTVEELRSMLTPSFKEALASMNSEELFTTYGTHYLSEVLVGGRADYVATTKTSAFSSDIQISVVAESSFKSVAGMDVSSKYKELIQIFQENSSTSLYAIGGSALSSITDTATYNAWLTSIDTRPVFCGFTCESLQPIWELAETPQRQEILQKATMTFIPPEIRRNAIVDVDIIVSDNYSVNPPYGYTKIDYDLNRNAEGKYIFLCYNQQKISVAGSPADPKPITALDVASGDDDDPDVPPGYTRINSDLNEGAGGKYIYLCYTKDPAAIPSDEDGLPIRGIRVIGNEKLENVVTPYGFTKIDKDLNEGAGGDYIFVCFSRHLD

SEQ ID NO: 655 - protein, 553 aa, Selaginella victoriae
MASPVLVHLNSPLPSSGNSSGGYCSTRLNASIFKETEVDKLFASLDRDYKQKRLSPDESSEVRMLPGDERSAGGDDFGLEWVPGCHSVGCGYNALTGYYADARSCLPRLFDMESGTFSKVSIADKEFALPRILAMRPRWAASTYIDTGKSIHEYNNSFRSKTGLEGNYNFFSASVEADIGITEAKNEQNEFCRVQSNVETFILQLGVGHENMLKPQVKNDIDTTKDLDKLYDTYGTHYLRTIVMGGHASYTSSTNKIRFQSEFKLDVVASMSFKFLMGGMSASEELRYKTSIESFNESSKVVIRTTGGDPGLGGPNLPKHIDEWLGSVKSFMSLSDFIRGETVPIWMLASTAARQTQLRNHYLDYCKRKQANYLTVPPLRVRRVPVTNSIYWGIGTPDIDGNWSYFAQAVAGDTLVVRETDPGSGMLGGISRWEMMVDNIDMWQDGFGSAWRGVPENPVDYVCLGDFVCRGRGPPTAEETRGIRSVHRSCVVPSRILSPDFHMPGWVMMGIYPVHNPKESSLQDLQPYLMLLRTPNQLSRQSYELSERRLLTS

SEQ ID NO: 656 - protein, 359 aa, Huperzia phlegmaria
MAQIEPLPGSDAIGHSYDVFGFYANPKSVKKELFDFALQKEITLEGHTWLLSTDIEHIAVRDTDINTVSLRTKDAYSTELAASVKVSGSYGSFSASVESDFSQSISDETDSTYTSVRTNVNKWKLSLKHTVEELRSKLKPALKEALANMKEVELLSTYGTHYMGEVLVGGRADYVATTKTSAFSSDTKISVVAESSFKSVAGMEVSAEYKELIKKFQENSSTRLYALGGSALSSITDTASYNAWFSSIDTRPVFCGFTRDSLRPIWELAESPQRREILRKAAQTFIPPEITRNAIVGVDIIMSDNYWVNPPYGYTKIDYDLNRNAKGKYIFLCYNQQKIFVGIPCGSDAHHCLVRGFWR

SEQ ID NO: 657 - protein, 477 aa, Selaginella pallescens
MAEHSEQKGSLILESLEEGRKLPGTEILGSGYDVLGGYYADPRSCLVNLFDFPAEVETVQIGNQEFSKSTGIVYHSSIGTDLDMSSGKSIQEYTKEINSKTKLEGNYSFFSASIEADIGIKSAQKSENEFSKAQYNVKFFTLQLPPHHSKMLKPQIKDDIDNMSDLVRLFDMYGTYYLAGILMGGAASSTSSTSTSTFNSSLDVSVAAKIAFQWSIGGLSAEEQAEYKQQVKSFNESSETTVRTTGGKPGIKFPAEIGEWSDSILDYMAFVDYLGSRSLVGIWELASTRERQDELHKFYHKYCRFRQMQIIPLLRARVVPFAQMSRLGSNLAAWAPDEPDMPFGWYYLGQVWYHTGPYKMVPAVFALIVQEMEPGMLADVRSWSKVGDGPEGSSFWHGSSASEDHLVLGNFFHDKSNPPTALESFGIKAVHMDCLVPANLGYYHNMPGSDVLLGLKVWPVVAADDTAIPMDKLLCCS

SEQ ID NO: 658 - protein, 315 aa, Huperzia phlegmaria
MLTPSFKEALASMNSEELFTTYGTHYLNEVLVGGRADYVATTKTSAFSSDTKISVVAESSFKSVAGMEVSAEQKQLIEKFQENSSTSPYAIGGSALSSITDTASYNAWLSSIDTLPVFCGFTYESLQPIWELAESPQRQEILQKATQTFIPLEIRRNAIVDVAIIVSDSHLVNPPYGFTKIDFDLNRGAKGKFIYLCYKQQKISVAGSPADPKPITALNVVSSDYPNPSVPSGYTMINTDLNQGSGGKFIYLCYTKDPAAIPSDEDGLPIRGLRVIGNQQVGNVITPYGFTRINKDLNEGAGGDYIFVCFSRHLD

SEQ ID NO: 659 - protein, 419 aa, Huperzia nummulariifolia (Blume)
MAQIEPLPGSDAIGHSYDVFGFYANPKSVNSQLFDFAPQQEIILEDHKWLLSTDIVYVAVRDTDIKTVSLCTKDEYSTELAASVKLSGSYGSFSASVESDFSQSISDDTDSTYTSVRTNVNKWKLSLKPTVEELRSMLTPSFKEALASMNSEELFTTYGTHYLSEVLVGGRADYVATTQTSAFSSDIQISVVAESSFKSVAGMDVSSKYKELIQIFQENSFTSLYAIGGSALSSITDTDTYNAWLSSIDTLPVFCGFTCESLQPIWELAESPQRQEILQKATMTFIPPEIRRNAIVDVDIIVSDNYSVNPPYGYTKIDYDLNRNAEGKYIFLCYNQQKISVAGSPADPKPITALDVASGDDDDPDVPPGYTRINSDLNEGAGGKYIYLCYTKDPAAIPSDEDGLPILASALLVRKKPSM

SEQ ID NO: 660 - protein, 381 aa, Huperzia carinata
MAQIEPLPGSDAMAQIEPLPGSDAIGHSYDVFGFYANPKSVKRELFDFAPQQEITEEGHTWLLSTDIVNTAVRDTEIKTVSLRTKDEYSTELAASVKVSGSYGGFSASVESDFSQSISQETDSTYTSVRTNVTKWKLGLKPTVEELRSMLTPSFKEALASMESEELFTTYGTYYLSEVLVGGRADYVATTKTSAFSSDTQISVVAESSFKSVAGMEVSSQYKELIKKFQENSSTRLYAIGGTALSSITDTATYNAWLSSIDTLPVFCGFTSASLKPIWELAESSQRQEILQKAAQTFIPLEIRRNAIVDVAIIVCGFTSTSLMPIWKLAESPQRQEILQKATQTFIPLEVRRNAIVEVDIIVSDVRQPSGESSLRLYEDRF

SEQ ID NO: 661 - protein, 344 aa, Huperzia salvinioides
MTRIPLTLQFVNVNKWKLSLKPTVEELRSMLTPSFKEALASMNSEELFTTYGTHYLSEVLVGGRADYVATTKTSAFSSDIQISVVAESSFKSVAGMDVSSKYKELIQIFQENSSTSLYAIGGSALSSITDTATYNAWLTSIDTRPVFCGFTCESLQPIWELAETPQRQEILQKATMTFIPPEIRRNAIVDVDIIVSDNYSVNPPYGYTKIDYDLNRNAEGKYIFLCYNQQKISVAGSPADPKPITALDVASGDDDDPDVPPGYTRINSDLNEGAGGKYIYLCYTKDPAAIPSDEDGLPIRGIRVIDNEKIENVITPYGFTRIDRDLNEGAGGYNIFVCFSRHLD

SEQ ID NO: 662 - protein, 376 aa, Selaginella victoriae
MSSNNVEVMFRRRGGLDSKKDHSSWLASVPERPEVISMSFVPITSLLSGVPGAGFLTHAINLYLRYKPPLEELHYFLEFQIPRQWTPPLELPSNVSNSGLPVLQFSPFGAKLYVSLEEATVGRLPVTGLEVTYVLLVLPFLKHGVQATVGRLPVTGLRLYIQGKRRNRLSVHLQYLASLPRILASHWGTNVYSETPVWMKSEDNPKWFLPVQWKSYSQVNTAPVEFGASYIGDKGAAFVVTGAQLQVSTHKTRNVLYLGLQFTRIPGCSVRRSAWDNMPTASQKSGSGFFSQLGLSTTLSTLNASPAPERFVQNSAVFSGEPSVSTKNSKMRKYVDITEMSKGIQDQPGHWIISGGKLDVENGKIFLKVKYSLLKY

SEQ ID NO: 663 - protein, 423 aa, Huperzia nummulariifolia (Blume)
MAQIEPLPGSDAIGHSYDVFGFYANPKSVNSQLFDFAPQQEIILEDHKWLLSTDIVYVAVRDTDIKTVSLCTKDEYSTELAASVKLSGSYGSFSASVESDFSQSISDDTDSTYTSVRTNVNKWKLSLKPTVEELRSMLTPSFKEALASMNSEELFTTYGTHYLSEVLVGGRADYVATTQTSAFSSDIQISVVAESSFKSVAGMDVSSKYKELIQIFQENSFTSLYAIGGSALSSITDTDTYNAWLSSIDSASLLPIWELAESPQRQEILQKATQTFIPLEIRRNAIVEVDIIVSDNHLVNPPYGYTKIDYDLNRNAEGKYIFLCYNQQKISVAGSPADPKPITALDVASGDDDDPDVPPGYTRINSDLNEGAGGKYIYLCYTKDPAAIPSDEDGLPILASALLVTKNSRMWLHLTDSRRLIKI

SEQ ID NO: 664 - protein, 320 aa, Huperzia goebelii (Holub)
MLTPSFKEALASMNSEELFTTYGTHYLSEVLVGGRADYVATTKTSAFSSDIQISVVAESSFKSVAGMDVSSKYKELIQIFQENSSTRLYAIGGTALSSITDTTTYNAWLSSIDTRPVFCGFTRDSLRPIWELAESPQRQEILQKATKTFIPLEIRRNAIVDVDIIVSDNCWANPPYGYTKIDYDLNRNAKGKYIFLCYNQQKISVAGSPADPKPITGLNVVSSDYPNPSVPSGYTMINTDLNQGAGGKFICLCYTKDPAAIPNYQDGLPIRGIRVIGNEKVENVVTPYGFTKINTDLDLNEGAKGEGGDYIFVCFSRHLD

SEQ ID NO: 665 - protein, 291 aa, Huperzia nummarifolia
MKVSAEQKQLIEKFQENSSTSLYAIGGSALSSITDTATYNAWLSSIDTRPVFCGFTRDSLRPIWELAESPQRREILRKATQTFIPPEITRNAVVGVDIIMSDNYWVNPPYGSQRREILQKATETFIPPEITRNAVVGVDIIMSDNYWVNPPYGYTKIDYDLNRNAKGKYIFLCYKQQKISVAGSPADPKPITALYVTSGDDYNPYVPPGYTKIDKDLNKDAGGKFIYLCYTKDPAAIPNDEDGLPIRGIRVIGNEKLENVVTPYGFTRIDKDLNKDAKGDYIFVCFSRHLD

SEQ ID NO: 666 - protein, 389 aa, Asplenium nidus var plicatum
MRSTSNTQRFQRTSDQVFRELGTTFSLSFPIKVLRLSFGATFRSIASSQTNVASALILVESYSRRLLILNEQRSIQQIPLRADFLQELRNLPEPPTSITAAAQWASYRQFLLRWGSHYASEVYYGSWLRTWATAASTKSYTQRQITAKGCADLTGSSRIPIIGGCRDIAISEMTAASRLDINVQIEIRGGESGTRAELAVRRTDRLIQDFIREGQVNDEADVKYGLAPIWRPVLARYHSATSKEWRVATALEAYYNGFLSFPCPYNIENGIVLQQFRRITTGTYRCVRPCQGCRDFHDCNLRQFGCYCYGRTCVAAGGEDNRAWIQTRFEGTRRDDASLSCVYRFPSCRCDAQYREANCGSDRFLTIWDQTKLYVNAKGSDTAEALSME

SEQ ID NO: 667 - protein, 321 aa, Selaginella victoriae
MTELDKVYDTYGTHYLGSIVMGGHASYTSATNKNKFKSSLELGFAAQVAGSLSVEEKVKYKSDIESFSESSSTKIQTSGGDPGLSGPDFPEHVGQWMDSVKEYMTLADFIAGETLGLWKLASTAQRQQQLRDHYSDYCKRNQSHFSGDVRPLRVKVVPLTNTIIENNWFSVSSPDVGGDWSYLGQVWDINGSTIVVAEAEPGSGILGDIARWEKIYEYDNHSYWRGVASNPVDYAVLSDFMKEGDSEPSAEETAGIKAVHTSCLTTEVCTASGYFSHGIYPVQMPYDPSLDNIKPYYWVTGDSEDQRQVHHLKGSCLQVEG

SEQ ID NO: 668 - protein, 318 aa, Huperzia carriata (Solomon Islands)
MLTPLFKEDLASMNSEELFTTYGTHYLSDVLVGGRTDYVATTKTSRFSSDSEISVAAESAFKSVAGMEVSSQYKELIKKFQENSSTSLYAMYAIGGTELSSITDTATYNKWLSSIDTLPVFCGFTSASLKPIWELAESSERQEILQKATKTFIPPEIRQNAIVDVDIIVSDDSSVNPPDGYTKIDYDLNHNAKGKYIFLCYNQQKISVAGSPADPKPITALYVASGDNNNPYVPPGYTMINRDLNAGAGGNFIYLCYTKDPAEIPNDEDGLPIRGIRVIGNEKVENVVTPYGFTKIDKDLNEGAGGDFIFVCFSRHLD

SEQ ID NO: 669 - protein, 382 aa, Selaginella biformis
MTPTAVDIGIKQAESREYEFSKVQSDVETFVLQLDVDHEKMLKPQVKKDIDEMKDLDNLYDTYGTHYLRTIVMGGHATYTSSTNKNEFSSEFELGVVASMSFKALVGSISASEEAKYTSSIQSFNESSTTKIETSGGDPGLGGTYFAKHVDEWINSVKDYMTLADFVHGETVPLWRLASTAEREDALQKHYLDYCKRKQTTYTLSGIPPLRVRRVPVTEGFQPYYHVGTPDIGGNWSYFGQTNGYGYTIVVQETQPGSGVLGRIAKWEKIGDVYGCSVWRGVPADPVDYVVLSDFTHRGSNAPTAEETVGIMAVHRSCLISIGSGSGLDNPSWDFCMWGVDPVYNPKVSLLEDLKLYVMVIFSGQGTREMYRLLASELQVED

SEQ ID NO: 670 - protein, 539 aa, Selaginella biformis
MADSPLVSVNLRAAVRENGYRMLKSPVFKEQHLERLWKSIDPHYKQKQLWASDSGTPLGDHDDNLESLPGCNIVGCGYNVLHGYYADARSCLQDLFDLESSGMSKVSVGAKEFAKPNVVIMRPKYATSTYVETGKTIEQYNSSISSKTQLQGEYNFFSASVEVDIGINQAENLQNEFTKVQSDVETFVLQLDVGHEKMLKPQVKKDIDEMKDLDNLYDTYGTHYLRTIVMGGHATYTSSTNKNEFSSEFELGVVASMSFKALVGSISASEEAKYTSSIQSFNESSTTKIETSGGDPGLGGTYFAKHVDEWINSVKDYMTLADFVHGETVPLWRLASTAEREDALQKHYLDYCKRKQTTYTLSGIPPLRVRRVPVTEGFQPYYHVGTPDIGGNWSYFGQTNGYGYTIVVQETQPGSGVLGRIAKWEKIGDVYGCSVWRGVPADPVDYVVLSDFTHRGSNAPTAEETVGIMAVHRSCLISIGSGSGLDNPSWDFCMWGVDPVYNPKVSLLEDLKLYVMVIFSGQGTREMYRLLASELQVED

SEQ ID NO: 671 - protein, 426 aa, Huperzia salvinioides
MTRIPLTLQFVNVNKWKLSLKPTVEELRSMLTPSFKEALASMNSEELFTTYGTHYLSEVLVGGRADYVATTKTSAFSSDIQISVVAESSFKSVAGMDVSSKYKELIQIFQENSSTSLYAIGGSALSSITDTATYNAWLTSIDTRPVFCGFTCESLQPIWELAETSERREILQKATQTFIPLEIRRNAIVEVDIIVSDNHLVNPPYGYTKIDYDLNRNAEGKYIFLCYNQQKISVAGSPADPKPITALDVASGDDDDPDVPPGYTRINSDLNEGAGGKYIYLCYTKDPAAIPSDEDGLPIRGIRVIGNEKVEYVITPYGFTRINKDLNALDVASGDDDDPDVPPGYTRINSDLNEGAGGKYIYLCYTKDPAAIPSDEDGLPIRGIRVIGNEKLENVVTPYGFTKIDKDLNEGAGGDYIFVCFSRHLD

SEQ ID NO: 672 - protein, 294 aa, Huperzia phlegmaria
MAQIESLPQSSDYAMDQIEPLPGSDAIGHSYDVFGFYANPKSVKKELFDFALQKEITLEGHTWLLSTDIVHIAVRDTDINTVSLRTKDAYSTELAASVKVSGSYGSFSASVESDFSQSISDETDSTYTSVRTNVNKWKLSLKPTVEELRSMLTPSFKEALASMNSEELFTTYGTHYLSEVLVGGRADYVATTKTSAFSSDTKISVVAESSFKSVAGMEVSAEYKELIKKFQENSSTRLYALGGSALSSITDTASYNAWFSSIDTRPVFCGFTHESLQPIWELAESPQRQEILHR

SEQ ID NO: 673 - protein, 300 aa, Huperzia goebelii (Holub)
MNAVELFSTYGTHYMGEVLVGGRADYVAITKTSAFSSDTKISAVAESSFNSMAGVKVSAAQKELIQIFQENSSTRLYAIGGTALSSITDTTTYNAWLSSIDTRPVFCGFTRDSLRPIWELAESRLCRETLRKATETFIPRGITRNAIVEVDIITSDNCWANPPYGYTKIDYDLNRNAKGKYIFLCYNQQKISVAGSPADPKPITALYVTSGDDYYPYVPRGYTKIDKDLNMNAGGKYIFLCYTKDPAASRDGLPIRGVRVIGNEKFENVVTPYGYTRIDEDLNNGAGGDYIFVCFSRHVD

SEQ ID NO: 674 - protein, 278 aa, Selaginella pallescens
MRKWGSHYVNAVYYGSWFQQWSTASSTMRFTERQFQARACVAVEGVGNKFPSVEACAGVGEQEKRAASSLSMRTRLVVRGGEPRTASMLSSGQRTDELLQQFIEEGLDSTVAVRYEFTPLWTQVLADYGMNTREGRIASAMEAYYEGFLAFGCPRMTTTNNIAMQRFRRSVSNLYSCERKCEGCSVAADCNRIGNSQICKCFGNSCIRLIEDNPEDRVEVQTTRDDLRQNEGPNRSCQFSGSSCRCVASAESNCVAGYRAIWNQWDALAEKDAVHAIG

SEQ ID NO: 675 - protein, 446 aa, Huperzia phlegmaria
MAQIESLPQSSDYAMDQIEPLPGSDAIGHSYDVFGFYANPKSVKKELFDFALQKEITLEGHTWLLSTDIVHIAVRDTDINTVSLRTKDAYSTELAASVKVSGSYGSFSASVESDFSQSISDETDSTYTSVRTNVNKWKLSLKPTVEELRSMLTPSFKEALASMNSEELFTTYGTHYLSEVLVGGRADYVATTKTSAFSSDTKISVVAESSFKSVAGMEVSAEYKELIKKFQENSSTRLYALGGSALSSITDTASYNAWFSSIDTRPVFCGFTHESLQPIWELAESPQRQEILQKATKTFIPPEIRRNAIVDVAIIVSDSHLVNPPYGFTKIDFDLNRGAKGKFIYLCYKQQKISVAGSPADPKPITALNVVSSDYPNPSVPSGYTMINTDLNQGSGGKFIYLCYTKDPAAIPSDEDGLPIRGLRVIGMKKSRMWLHLTDSRRLIKI

SEQ ID NO: 676 - protein, 252 aa, Selaginella victoriae (LW10887)
MFILQLPIDHQTMLKPKVKEDIDNMTDLDKVYDTYGTHYLGSIVMGGHASYTSATNKNKFKSSLELGFAAQVAFKSLVGSLSVEEKVKYKSDIESFSESSSTKIQTSGGDPGLSGPDFPEHVGQWMDSVKEYMTLADFIAGETLGLWKLASTAQRQQQLRDHYSDYCKRNQSHFSGDVRPLRVKVVPLTNTIIENNWFSVSSPDVGGDWSYLGQVWDINGSTIVVAEAEPGSGILGDIARWEKIYETAIGVG

SEQ ID NO: 677 - protein, 365 aa, Platycerium bifurcatum
MALIEPLPGSDAIGHSYDVFGFYANPKSVNTQLFDFAPQQEIILEDHKWLLSTDIEYIAVRETEIKTVSLRTKDAYSTELAASVKVSGSYGSFSASVESDFSQSISDETDSTYTSVRTNVNKWKLSLKPTVEELRSMLTPSFKEALASMDSEELFTTYGTHYLSEVLVGGRADYVATTKTSAFSSDIQISVVAECSFKSVAGMEVSSQYKELIKTFQENSSTRLYAIGGTALSSICSFKSVAGMEVSSQYKELIKTFQENSSTRLYAIGGTTISSITDKDTYNAWLSSIDTRPVFCGFTYESLQPIWELAESPQRQEILQKATKTFISTVLGPSGSLLNSLCAGRFSEKLPKRLSHTKCNCWRRG

SEQ ID NO: 678 - protein, 260 aa, Huperzia carinata
MACIEPLPGSDAIGHSYDVFGFYANPKSVKRELFDFAPQQEITEEGHTWLLSTDIEYIAVLDTEIKTVSLGTKDAYSSELAASVKLSGSYGGFSASVESDFSQSISQETDSTYTSVRTNVTKWKLGLKPTVEELRSMLTPSFKEALASMESEELFTTYGTYYLSEVLVGGRADYVATTKTSAFSSDTQISVVAESSFKSVAGMEVSSQYKELIKKFQENSSTRLYAIGGTALSSITDTATYNACGSALSNVTYTATYNAW

SEQ ID NO: 679 - protein, 465 aa, Huperzia goebelii (Holub)
MAEIESLPQSSDYAMDQIEPLPGSDAIGHSYDVFGFFANPKSVKRQLFNFASQEEITLEGHSWLLSTDIEYTAVRDTDIKTVSYRTKDAYSTELAASVKVSGSYGSFSASVESDFSQSISDETDSTYTSVRTNVTKWKLSLKRTVEELRSMLKPSFKEALASMSSEELFTTYGTHYLSEVLVGGRADYVATTKTSAFSSDTEIKLAAESSFKSMAGMGNSSQYKELIQKFQENSSILLYAIGGTALSSITDTTTYNAWLSSIDTRPVFCGFTRDSLRPIWELAESPQRQEILQKATKTFIPLEIRRNAIVDVDIIVSDNCWANPPYGYTKIDYDLNRNAKGKYIFLCYNQQKISVAGSPADPKPITGLNVVSSDYPNPSVPSGYTMINTDLNQGAGGKFICLCYTKDPAAIPNYQDGLPIRGIRVIGNEKVENVVTPYGFTKINTDLNDGAGGDYIFVCFSRHLD

SEQ ID NO: 680 - protein, 277 aa, Selaginella kraussiana (Variegata)
MRKWGSHYVNAVYYGSWFQQWSTASSTMRFTERQFQARACVAVEGVGNKFPSVEACAGVGEQEKRAASSLSMRTRLVVRGGEPRTASMLSSGQRTDELLQQFIKEGLDSTVAVRYQFTPLWTQVLAVYGMNTREGRIASAMEAYYEGFLAFGCPRMTTTNNIAMQRFRRSVSNLYSCERKCEGCSVAADCNRIGNSRICNCFGNSCIRLIEGNPEGRVEVQTTRDDLRQNEGPNRSCQFSGSSCRCVASAESNCVAGYRAIWNQWDALAEKDAVQVM

SEQ ID NO: 681 - protein, 252 aa, Huperzia carinata
MAGMESSSEYKELIQKFQENSSTRLYAIGGTALSSITDTATYNAWLSSIDTLPVFCGFTSASLKPIWELAESSQRQEILQKAAQTFIPLEIRRNAIVDVAIIVSDNHLVNPPYGFTKIDFDLNRGAKGKFIYLCYKQQKISVAGSPTDPKPITDLYVASGDNKDPSVPRGYTKINRDLNDGAGGKYIYLCYTKDPAEIPDDEDGLPIRGIRVIGKTKAIDVITPYGFTRIDTDLNDGAGGDYIFVCFSRHLD

SEQ ID NO: 682 - protein, 331 aa, Huperzia salvinioides
MNKWKLSEAQCGKAALPVEACVEGGIGEYESSGAVEYLRDNYMGEVLVGGRGDYVATTKTSAFSSSTKISTVAESSFKSMAGMKVSATHDQLIQTFQENSSTSLYAIGGTALSSITDTATYNAWLTSIDTRPVFCGFTRESLQPIWELAESPQRREILQKATQTFIPSGITRNAIVGVDIIISDSYWVNPPYGYTKIDYDLNRNAKGKYIFLCYKQQKISVARSPVDPKPITALDVASGDDDNPYVPSGYTKINKDLNKGAGGKFIYLCYTKDPAAIPNYEDGLPIRGIRVIDDEKLENVVTPYGYTRIDEDLNKGAGGDYIFVCFSRHLD

SEQ ID NO: 683 - protein, 384 aa, Huperzia phlegmaria
MARIEPLPGSDAIGHSYDVFGFYANPKSVKKELFDFALQKEITLEGHTWLLSTDIVHIAVRDTDINTVSLRTKDAYSTELAASVKVSGSYGSFSASVESDFSPSELAASAKVSGSYGSFSASVESDFSQSISDETDSTYTSVRTNVNKWKLSLKHTVEELRSKLKPALKEALANMKEVELLSTYGTHYMGEVLVGGRADYVATTKTSAFSSDTKISVVAESSFKSVAGMEFPRSFFFFLRNSFFFFTSLYAIGGSALSSITDAATYNAWLTSIDTRPVFCGFTRDSLRPIWELAESPQRREILRKAAQTFIPPEITRNAIVGVDIIMSDNYWVNPPYGYTKIDYDLNRNAKGKYIFLCYNQQKIFVGIPCGSDAHHCLVRGFWR

SEQ ID NO: 684 - protein, 425 aa, Huperzia carinata
MACIEPLPGSDAIGHSYDVFGFYANPKSVKRELFDFAPQQEITEEGHTWLLSTDIVNTAVRDTEIKTVSLRTKDEYSTELAASVKVSGSYGGFSASVESDFSQSISQETDSTYTSVRTNVTKWKLGLKPTVEELRSMLTPSFKEALASMESEELFTTYGTYYLSEVLVGGRADYVATTKTSAFSSDTQISVVAESSFKSVAGMEVSSQYKELIKKFQENSSTRLYAIGGTALSSITDTATYNAWLSSIDTLPVFCGFTSASLKPIWELAESSQRQEILQKAAQTFIPLEIRRNAIVDVAIIVSDNHLVNPPYGFTKIDFDLNRGAKGKFIYLCYKQQKISVAGSPADPKPITALNVVSSDYHDPSAPSGYTMINTDLNQGAKGKFIYLCYTKDPAAYLSLLHKRSGCNTQRRGWTAHTWHPRYRQ

SEQ ID NO: 685 - protein, 348 aa, Selaginella victoriae
MSSNNVEVMFRRRGGLDSKKDHSSWLASVPERPEVISMSFVPITSLLSGVPGAGFLTHAINLYLRYKPPLEELHYFLEFQIPRQWTPPLELPSNVSNSGLPVLQFSPFGAKLYVSLEEATVGRLPVTGLRLYIQGKRRNRLSVHLQYLASLPRILASHWGTNVYSETPVWMKSEDNPKWFLPVQWKSYSQVNTAPVEFGASYIGDKGAAFVVTGAQLQVSTHKTRNVLYLGLQFTRIPGCSVRRSAWDNMPTASQKSGSGFFSQLGLSTTLSTLNASPAPERFVQNSAVFSGEPSVSTKNSKMRKYVDITEMSKGIQDQPGHWIISGGKLDVENGKIFLKVKYSLLKY

SEQ ID NO: 686 - protein, 451 aa, Huperzia carinata
MAQIEPLPGSDAIGHSYDVFGFYANPKSVKRELFDFAPQQEITEEGHTWLLSTDIVNTAVRDTEIKTVSLRTKDEYSTELAASVKVSGSYGGFSASVESDFSQSISQETDSTYTSVRTNVTKWKLGLKPTVEELRSMLTPSFKEALASMESEELFTTYGTYYLSEVLVGGRADYVATTKTSAFSSDTQISVVAESSFKSVAGMEVSSQYKELIKKFQENSSTRLYAIGGTALSSITDTATYNAWLSSIDTLPVFCGFTSASLKPIWELAESSQRQEILQKAAQTFIPLEIRRNAIVDVAIIVSDNHLVNPPYGFTKIDFDLNRGAKGKFIYLCYKQQKISVAGSPTDPKPITDLYVASGDNKDPSVPRGYTKINRDLNDGAGGKYIYLCYTKDPAEIPDDEDGLPIRGIRVIGKTKAIDVITPYGFTRIDTDLNDGAGGDYIFVCFSRHLD

SEQ ID NO: 687 - protein, 360 aa, Huperzia goebelii (Holub)
MAQIEPLPGSDAIGHSYDVFGFFANPKSVKRQLFNFASQEEITLEGHSWLLSTDIEYTAVRDTDIKTVSYRTKDAYSTELAASVKVSGSYGSFSASVESDFSQSISDETDSTYTSVRTNVNKWKLSLKPTVEELRSMLTPSFKEALASMNSEELFTTYGTHYLSEVLVGGRADYVATTKTSAFSSDIQISVVAESSFKSVAGMDVSSKYKELIQIFQENSSTRLYAIGGTALSSITDTTTYNAWLSSIDTRPVFCGFTRDSLRPIWELAESPQRQEILQKATKTFIPLEIRRNAIVDVDIIVSDNCWANPPYGYTKIDYDLNRNAKGKYIFLCYNQQKISVAGSPADPKPITALYVASGD

SEQ ID NO: 688 - protein, 340 aa, Huperzia carriata (Solomon Islands)
MAEIKPLPGSDSIGHSYDVFGFFANLKSVKRQLFDFAPQEEITLEGHNWLLSADIEYTAARDTEIKTISDRTTDAYSTELAASVKVSGSYGYFSASVESDFSQSISDETDSTYTSVRTNVTKWKLNLKPTVEELRSMLTPSFKEALASMDSDELFTTYGTYYLSEVLVGGRADYVATTKTSAFSSDTQIGVVAESSFKSVAGMEVSSQYKELIKKFQENSSTSLYAIGGSAISSITDTATYNKWLSSIDTLPVFCGFTSASLMPIWELAESSERQEILQKATKTFIPPEIRQNAIVDVDIIVSDDSSVNPPDGYTKIDYDLNHNAKGKYIFLCYNQQKII

SEQ ID NO: 689 - protein, 343 aa, Huperzia nummulariifolia (Blume)
MRSKLKSDLKEALASMKVCVEGGIGQYESIGVVESVRNKYMGYRYVFVGGRTGQLYVQGVIGRSCSADYVATTKTSAFSSSTKISTVAESSFKSMAGMKVSATHDQLIQTFQENSSTKSSFKSVAGMDVSSKYKELIQIFQENSFTSLYAIGGSALSSITDTDTYNAWLSSIDTLPVFCGFTCESLQPIWELAESPQRQEILQKATMTFIPPEIRRNAIVDVDIIVSDNYSVNPPYGYTKIDYDLNRNAEGKYIFLCYNQQKISVAGSPADPKPITALDVASGDDDDPDVPPGYTRINSDLNEGAGGKYIYLCYTKDPAAIPSDEDGLPILASALSAMKNFRM

SEQ ID NO: 690 - protein, 358 aa, Platycerium bifurcatum
MAQIEPLPGSDAIGHSYDVFGFYANPKSVNTQLFDFAPQQEIILEDHKWLLSTDIEYIAVRETEIKTVSLRTKDAYSTELAASVKVSGSYGSFSASVESDFSQSISDETDSTYTSVRTNVNKWKLSLKPTVEELRSMLTPSFKEALASMDSEELFTTYGTHYLSEVLVGGRADYVATTKTSAFSSDIQISVVAECSFKSVAGMEVSSQYKELIKTFQENSSTRLYAIGGTTISSITDKDTYNAWLSSIDTRPVFCGFTYESLQPIWELAESPQRQEILQKATKTFISPEIKRNAIVDVDIIVSDNYGVNPPYGYTKIDYDLNRNAKGKYIFLCYTEDISSRIPCGSEAHHCFVRGFWR

SEQ ID NO: 691 - protein, 485 aa, Selaginella pallescens
MAEHSEQKGSLILESLEEGRKLPGTEILGSGYDVLGGYYADPRSCLVNLFDFPAEVETVQIGNQEFSKSTGIVYHSSIGTDLDMSSGKSIQEYTKEINSKTKLEGNYSFFSASIEADIGIKSAQKSENEFSKAQYNVKFFTLQLPPHHSKMLKPQIKDDIDNMSDLVRLFDMYGTYYLAGILMGGAASSTSSTSTSTFNSSLDVSVAAKIAFQWSIGGLSAEEQAEYKQQVKSFNESSETTVRTTGGKPGIKFPAEIGEWSDSILDYMAFVDYLGSRSLVGIWELASTRERQDELHKFYHKYCRFRQMQIIPLLRARVVPFAQMSRLGSNLAAWAPDEPDMPFGWYYLGQVWYHTGPYKMVPAVFALIVQEMEPGMLADVRSWSKVGDGPEGSSFWHGSSASEDHLVLGNFFHDKSNPPTALESFGIKAVHMDCLVPANLGYYHNMPGSDVLLGLKVWPVVAADDTAIPMDKLQSCFSLDGPGPF

SEQ ID NO: 692 - protein, 346 aa, Huperzia salvinioides
MTRIPLTLQFVNVNKWKLSLKPTVEELRSMLTPSFKEALASMNSEELFTTYGTHYLSEVLVGGRADYVATTKTSAFSSDIQISVVAESSFKSVAGMDVSSKYKELIQIFQENSSTSLYAIGGSALSSITDTATYNAWLTSIDTRPVFCGFTCESLQPIWELAETSERREILQKATQTFIPLEIKRNAIVDVDIVVSDNHKVNPPYGFTKVDYDLNNNANGKYIYLCYKQQKISVAGSPADPKPITALDVASGDDDDPDVPPGYTRINSDLNEGAGGKYIYLCYTKDPAAIPSDEDGLPIRGIRVIDDEKLENVVTPYGYTRIDEDLNKGAGGDYIFVCFSRHLDSL

SEQ ID NO: 693 - protein, 449 aa, Selaginella pallescens
MSYTSSIVFSFVLAALLFYPFCVQSSNVHIGNGLYLPDTNLMVPINSQYTIFEGDISRFLREEPLGITFNNKVFSRDTESLYREFSQTFGLNAQYRVVQISVEQSLQHIAGSETNVTALSIDVLTYSKKLSIRNEARTITRIPLREAFLQELRQLPEYPADGDNNWLPYLRFMRKWGSHYVNAVYYGSWFQQWSTASSTMRFTERQFQARACVAVEGVGNKFPSVEACAGVGEQEKRAASSLSMRTRLVVRGGEPRTASMLSSGQRTDELLQQFIEEGLDSTVAVRYEFTPLWTQVLADYGMNTREGRIASAMEAYYEGFLAFGCPRMTTTNNIAMQRFRRSVSNLYSCERKCEGCSVAADCNRIGNSQICKCFGNSCIRLIEDNPEDRVEVQTTRDDLRQNEGPNRSCQFSGSSCRCVASAESNCVAGYRAIWNQWDALAEKDAVQVM

SEQ ID NO: 694 - protein, 490 aa, Selaginella victoriae
MVDRAEFMQSSTKVFQFCSFLVLAYYIGYTSCVQNLGHGVYLPDTNLVSNSNPNAPQLIFRENVADFVTNESFSRMVDRAEFMQSSTQVFQFFGISFGMSFPIKKLMFSFDTSFQAISGGRQEIKAAVLQVESYSRRSFFRNNLALQLNPTLVQDLNSLPEPPTITAHRHDWRNHENFLRKWGSHYMTEVRYGSWMRQFTSAASTETYSEIEMKANACARLFGGKLSKIGACAGITQQQINANSNLRVRLTTEVRGGNAQTAAQLRRIPVQESVIESFKVEGRNSNEAVVYHFAPIWQAIKARYSVQTRQWRQADALESFYVGFLAFDCPQRILNTGSSSEPTTLLQQFRRRGEKFQCVRHCVGCRRSKDCNFHTTGNGAPGCYCYGNSCLVAQGAESRIAIQTRRDNLPRNVNPNRSCQQSGVSGCKCDRNPRENGCGADNMIEIWPQTPRNPNPGTLNAYEETGVDIVDDMIMVQEDEVVYDEMKNIM

SEQ ID NO: 695 - protein, 263 aa, Selaginella kraussiana (Variegata)
MVISGAETKAVAAIQALGCGFDVTLDHKLEYAKSRLVDLDPETRTVVVPGNIIVEDVSMDIKVDKGENTRLRTDALDFHQMSERFNQGCGIAGKMPLGLLTAMYDLKGPWQLDALSTKCLAFDGYIAVLYEMKVAKSLISLLREVKDAVPSNWQPLELTRFIEKYGTHVITGVKVGGKDVIYLRQSQSSKLSAVDIQRYLESLAEQRFADGSGRRFKVFKKGAKTKVADPFAMIDRSKVINNFSSISISDDVSTKLSNMATYL

SEQ ID NO: 696 - protein, 486 aa, Platycerium bifurcatum
MALIEPLPGSDAIGHSYDVFGFYANPKSVNTQLFDFAPQQEIILEDHKWLLSTDIEYIAVRETEIKTVSLRTKDAYSTELAASVKVSGSYGSFSASVESDFSQSISDETDSTYTSVRTNVNKWKLSLKPTVEELRSMLTPSFKEALASMDSEELFTTYGTHYLSEVLVGGRADYVATTKTSAFSSDIQISVVAECSFKSVAGMEVSSQYKELIKTFQENSSTRLYAIGGTTISSITDKDTYNAWLSSIDTRPVFCGFTYESLQPIWELAESPQRQEILQKATKTFISPEIKRNAIVDVDIIVSDNYGVNPPYGYTKIDYDLSPEIKRNAIVDVDIIVSDNYGVNPPYGYTKIDYDLNRNAKGKFIYLCYKQQKISVAGSPADPKPITALNVVSSDYHDPSGPSGYTMIYTDLNQGVGGKFIYLCYTKDPAAIPNDEDGLPIRGIRVIGNEKLENVVTPYGYTRIDKDLNEGAGGDFIYVCFSRHLD

SEQ ID NO: 697 - protein, 451 aa, Huperzia phlegmoides
MAQIEPLPGSDAIGHSYDVFGFYANPKSVKRQLFDFAPQQEITEEGHTWLLSTDIVYTAVRDTEIKTVSLRTKDEYSTELAASVKVSGSYGGFSASVESDFSQSISQETDSTYTSVRTNVTKWKLSLKPTVEELRSMLTPSFKEALASMDSEELFTTYGTYYLSEVLVGGRADYVATTKISAFSSDTQISVVAESSFKSVAGMDVPSDYKELIEKFQEKSSTSLYAIGGTALSSITDTATYNAWLSSIDTLPVFCGFTSASLRPIWELAESSQRQQILQKATQTFIPLEIRRNAIVDVAIIVSDNHLVNPPYGFTKIDFDLNRGAKGKFIYLCYKQQKISVAGSPADPKPITALNVVSSDYHDPSGPSGYTMINTDLNQGVGGKFIYLCYTKDPAAIPSDEDGLPIRGIRVIGNPQFGNVVTPYGFTRIDKDLNEGAKGEFIYVCFSRHLD

SEQ ID NO: 698 - protein, 301 aa, Platycerium bifurcatum
MQSDTVMMYSDFTPTPRALIHTSSTLRSRKKSFLRATPVSTDIEYIAVRDTEIKTVSLRTKDAYSSKLAASVKLSGSYGSFSASVESDFSQSISDETDFTYTSVRTNVNKWKLSLKPTVEELRSMLTPSFKEALASMDSEELFTTYGTHYLSEVLVGGRADYVATTKTSAFSSDIQISVVAECSFKSVAGMDVSAKYKELIQKFQENSSTSLYAIGGTALNSSTSLYAIGGTAISSITDTDTYNAWLSSIDTCPVFCGFTYESLQPIWELAESPQRQEILQKATQTFIPLRPKSNEMQSST

SEQ ID NO: 699 - protein, 324 aa, Asplenium australasicum
MSCCCCCCSSSSASADGAVSIGSTVYLPESNLGAPLSPLRISIFEGDISSFLRNQSLHHTYNTQRFQSTSDSVFGELGTTFGLSVPLKVLRLSFSTTFRTIAGSQTNVSSALVLVESYSKRQLILNEQRSIQQIPLRADFLQELRNLPEPPTSITAATQWASYRDFLIRWGSHYASEVYYGSWLRTWATAASTKSYTQRQITAKGCADLTGASPIPTIQGCAGIDTAEMTAASRLDVNVQIEVRGGEPATRAQLTVRRTDQLIQDFVQQGQENDDAAVKYGLVPIWRPILARYHSPSSKEWRVATALEGYYKSTMASWRSLVPT

SEQ ID NO: 700 - protein, 323 aa, Huperzia phlegmaria
MAQIEPLPGSDAIGHSYDVFGFYANPKSVKKELFDFALQKEITLEGHTWLLSTDIEHIAVRDTEIKTVSLRTKDAYSSELAASVKLSGSYGGFSASVESDFSQSISDETDSTFTSVRTKSGSYGSFSASVESDFSQSISDETDSTYTSVRTNVNKWKLSLKPTVEELRSMLTPSFKEALASMNSEELFTTYGTHYLNEVLVGGRADYVATTKTSAFSSDTKISVVAESSFKSVAGMEVSAEQKQLIEKFQENSSTSPYAIGGSALSSITDTASYNAWLSSIDTLPVFCGFTYESLQPIWELAESPQRQEILQSRLLWIHSRQS

SEQ ID NO: 701 - protein, 359 aa, Huperzia phlegmaria
MAQIEPLPGSDAIGHSYDVFGFYANPKSVKKELFDFALQKEITLEGHTWLLSTDIVHIAVRDTDINTVSLRTKDAYSTELAASVKVSGSYGSFSASVESDFSQSISDETDSTYTSVRTNVNKWKLSLKPTVEELRSMLTPSFKEALASMNSEELFTTYGTHYLSEVLVGGRADYVATTKTSAFSSDTKISVVAESSFKSVAGMEVSAEYKELIKKFQENSSTRLYALGGSALSSITDTASYNAWFSSIDTRPVFCGFTRDSLRPIWELAESPQRREILRKAAQTFIPPEITRNAIVGVDIIMSDNYWVNPPYGYTKIDYDLNRNAKGKYIFLCYNQQKIFVGIPCGSDAHHCLVRGFWR

SEQ ID NO: 702 - protein, 313 aa, Platycerium bifurcatum
MSGGYGGFSASVESDFSQSISDETDFTYTSVRTNVNKWKLSLKPTVEELRSMLTPSFKEALASMDSEELFTTYGTHYLSEVLVGGRADYVATTKTSAFSSDIQISVVAECSFKSVAGMDVSAKYKELIQKFQENSSTSLYAIGGTALSVDSLTKVFSPFGNSLNPLSARRSSKRLRPITALYVASGDDDNPYVPPGYTKIDQDLNKDAGGKFIYLSYTKDPAAIPNDEDGLPIRGIRVIGNENIDNVVTPYGFTKIDKDLNEGAGGDFIYVCFSRDHPYVPPGYTRISSDLNEGAGGKIIHTFLQVIPGSTAI

SEQ ID NO: 703 - protein, 282 aa, Huperzia nummulariifolia
MNSEELFTTYGTHYLSEVLVGGRADYVATTKTSAFSSDIQISVVAEIVAENSFKSMAGMENSSEYKELIQKFQENSSTSLSSFKSMAGMENSSEYKELIQKFQENAPLVRTPSVGRALSSIKILPLTTHGSVRLIPFPSSVDSLAQVLGPSGNSLNPLSARRSSKRLSSIDTLPVFCGFTSASLRPIWELAESSQRQEILQKATKTFISPEIKRNAIVDVDIIVSDNYGVNPPYGYTKIDYDLEPQCQGQIYLFVLQSTEDISSRIPCGSEAHHCFVRGFWR

SEQ ID NO: 704 - protein, 592 aa, Selaginella kraussiana (Variegata)
MTDAYEWMKTLPGCDTIGSGYDILNGYYADARSCLENLFDFSSVDNEIVVVSGTQYTKPKVLTYHSSIQTDLHMSEGESIMEYNRSVNMKTKLEGEYNFFSASVELDIGKASAENQENSFSRIQENVSYFTLQLPSSYCDLLIKPRMKKDIDEMTDLTKLFKTYGTHYVSGMIIGGSATYTASTNKTTFKSKLGLGYVAKMSYQALVGGLSAQLESQYGEDIKAFNQASSTKLMAKGGDPAYGGHDFPKHTKEWRNSVKDNLAFVDFLSNRGLTGIWNLASTDARSKQIEGHYAEYCEKSQTNFNMESPLIRAKIVPLTKVQFTDTGSRASLELAVCIPDIGSDWYYLGQVAVPGHNLPKGSTLAVQEIKPGALVKVNRWEKIWDDQGSGARNDYNLWRGLAENPVDYHVLSDFFRGNVDGYNKQEPPTEQDTRGIVAVHSSCVVPAQVGKMIWNAGGTGASNEASVWQIISTTGLANLMDNLSKTTMDTSHVDLGYVGTADISDGELGLPTKPPPGGNVSTAISNGELGLPGGNVRTTDFKPPAPQSSIISNRAESIDTSKILPYYVSTLDNYKPHRPVYLLKKSAVQFVN

SEQ ID NO: 705 - protein, 451 aa, Huperzia carinata
MACIEPLPGSDAIGHSYDVFGFYANPKSVKRELFDFAPQQEITEEGHTWLLSTDIVNTAVRDTEIKTVSLRTKDEYSTELAASVKVSGSYGGFSASVESDFSQSISQETDSTYTSVRTNVTKWKLGLKPTVEELRSMLTPSFKEALASMESEELFTTYGTYYLSEVLVGGRADYVATTKTSAFSSDTQISVVAESSFKSVAGMEVSSQYKELIKKFQENSSTRLYAIGGTALSSITDTATYNAWLSSIDTLPVFCGFTSASLKPIWELAESSQRQEILQKAAQTFIPLEIRRNAIVDVAIIVSDNHLVNPPYGFTKIDFDLNRGAKGKFIYLCYKQQKISVAGSPADPKPITALNVVSSDYHDPSAPSGYTMINTDLNQGAKGKFIYLCYTKDPAAIPSDEDGLPIRGLRVIGNPQVENVVTPYGFTRINKDLNEGAKGEYIYVCFSRHLD

SEQ ID NO: 706 - protein, 296 aa, Huperzia nummulariifolia (Blume)
MLTPSFKEALASMNSEELFTTYGTHYLSEVLVGGRADYVATTQTSAFSSDIQISVVAESSFKSVAGMDVSSKYKELIQIFQENSFTSLYAIGGSALSSITDTDTYNAWLSSIDTLPVFCGFTCESLQPIWELAESPQRQEILQKATQTFIPLEIKRNAIVDVDIVVSDNHKVNPPYGFTKVDYDLNNNANGKYIYLCYKQQKISVAGSPADPKPITALDVASGDDDDPDVPPGYTRINSDLNEGAGGKYIYLCYTKDPAAIPSDEDGLPILASALLVTKNSRMWLHLTDSRRLIKI

SEQ ID NO: 707 - protein, 328 aa, Huperzia squarrosa
MVHIEPLPGSDAIGHSYDVFGFYANPKSVKKELFDFALQKEITSEGHTWLLSTDIEYIAVRDTEIKTVSIRTKDAYSSELAASVKLCGSYGGFSASVESDFSESISDETDSTYTSVRTNVNKWKLSLKHTVEELRSKLKPALKEALASMKAVELLSTYGTHYMAEVLVGGRADYVATTKNSAFSSDTKISIVAESSFKSVAGMKVSAEQKQLIEKFQENSSTSLYAIGGSALSSITNTATYNAWLSSIDTRPVFCGFTRDSLRPIWELAESPRRREILRTATQTFIPSGITRNAIVGVDIIVSDNYSVNPPYGYTRRSYDPIRRSIMI

SEQ ID NO: 708 - protein, 380 aa, Selaginella victoriae (LW10887)
MRNFKKGARKKVADPIASLDRSRLSSNYGSAFMSSNNVEVMFRRRGGLDSKKDHSSWLASVPERPEVISMSFVPITSLLSGVPGAGFLTHAINLYLRYKPPLEELHYFLEFQIPRQWTPPLELPSNVSNSGLPVLQFSPFGAKLYVSLEEATVGRLPVTGLRLYIQGKRRNRLSVHLQYLASLPRILASHWGTNVYSETPVWMKSEDNPKWFLPVQWKSYSQVNTAPVEFGASYIGDKGAAFVVTGAQLQVSTHKTRNVLYLGLQFTRIPGCSVRRSAWDNMPTASQKSGSGFFSQLGLSTTLSTLNASPAPERFVQNSAVFSGEPSVSTKNSKMRKYVDITEMSKGIQDQPGHWIISGGKLDVENGKIFLKVKYSLLKY

SEQ ID NO: 709 - protein, 252 aa, Huperzia nummarifolia
MAGVKVSAAQKQLINKFQENSSTRLYAIGGSALSSITDTATYNAWLSSIDTLPVFCGFTSASLLPIWELAESSQRQDILQKATQTFIPLEIRRNAIVDMDIIVSDNYVVNPPYGFTKIDYDLNRNAKGKYIFLCYKQQKISVAGSPADPKPITALYVTSGDDYNPYVPPGYTKIDKDLNKDAGGKFIYLCYTKDPAAIPNDEDGLPIRGIRVIGNEKLENVVTPYGYTRIDQDLNKGAGGDYIFVCFSRYVD

SEQ ID NO: 710 - protein, 362 aa, Selaginella biformis
MGGHATYTSSTNKNEFSSEFELGLVASMSFKALVGSISVYDTYGTHYLRTIVMGGHATYTSSTNKNEFSSEFELGVVASMSFKALVGSISASEEAKYTSSIQSFNESSTTKIETSGGDPGLGGTYFAKHVDEWINSVKDYMTLADFVHGETVPLWRLASTAEREDALQKHYLDYCKRKQTTYTLSGIPPLRVRRVPVTEGFQPYYHVGTPDIGGNWSYFGQTNGYGYTIVVQETQPGSGVLGRIAKWEKIGDVYGCSVWRGVPADPVDYVVLSDFTHRGSNAPTAEETVGIMAVHRSCLISIGSGSGLDNPSWDFCMWGVDPVYNPKVSLLEDLKLYVMVIFSGQGTREMYRLLASELQVED

SEQ ID NO: 711 - protein, 295 aa, Huperzia nummulariifolia (Blume)
MACIEPLPGSDAIGHSYDVFGFYANPKSVNSQLFDFAPQQEIILEDHKWLLSTDIVYVAVRDTDIKTVSLCTKDEYSTELAASVKLSGSYGSFSASVESDFSQSISDDTDSTYTSVRTNVNKWKLSLKPTVEELRSMLTPSFKEALASMNSEELFTTYGTHYLSEVLVGGRADYVATTQTSAFSSDTKISIVAESSFKSVAGMKVSAEQKQLIEKFQENRSTSLYAIGGSALSSITDTATYNAWLTSIDTRPVFCGFTRDSLRPIWELAESPQRREVLRKAAQTYIPPHEMPSLA

SEQ ID NO: 712 - protein, 300 aa, Tupidanthus calyptratus
MEPRKNMSSDALNTTLWNSIQALGRGFDVTSDIRLLYCKGIPGSRLVQINDRDAKDLRVSDEFVVPNVSVDIECSKGEKITETTPVCSFHEMAIYFNEKSEISGDVPLGSFNAMFNLTGSWQLDAATTKSLAMIGSVIPLYKVELANLDLVLNEEVKRAVPYSWDPASLASFIENYGTHIVTSATVGGRDVVYIRQHQSSPLSVSDIENYVKDIADQRYSESRSHPSAAPLKYKDKDVTVIFRRRGGDDLEQSHIRWAETVQTSPDVINMTFIPIVSLLEGVPGIKHLACAIELYLECKI

SEQ ID NO: 713 - protein, 583 aa, Equisetum arvense
MAEDEDPVVEPCQSLAASSIQAMGRGFDLTCDIRLSYCKGVSPLVHLDQQNKKDLRLPGGISIPDAPAEIQCLHGRTSHHGTNTLNFDQMSERFNKALSIEGKIPSGLFNAMFSFSGSWRADASTTKSLALDGWFSTLYNLKLAKHSLKLHDEVKREVPSTWDPEALASFIEKHGTHIVTSVTVGGKDTIYVKQHQSSSLTSIEIESYLKELGDRRFLAGSSNPALDLNDKAAGQSSPLTGPNLVQTLGSDGPSSLTGKEDVTVIYRRRGGDDLVQNHEEWKDTIKSNPDVISMTFIPITSLLEGCPGKEHLIRAIDVYLEYKPPIEELQYFLEFQVTKVWAPVQNDGRLPRKEPICPSLQFSLMGPKLFINTEQVSVGRRPVTGLRLSLEGTKANRLCIHIQHLVALPKILRPHWDSYVAIGALKWHGPEEQDSRWFEPIQWKNFSHVSTAPIEFNEAWMVDLSGAHVVTGAQLGVWDFGPKSVLYLRLLYSKVPGCTIRRSVWDHNPVSYHHSDASKDIINNSPVSSSGALQVNKLVKFVDTEEMTRGPHDMPGHWLVTGAKLGVEKSRIFLRAKYSLLNY

SEQ ID NO: 714 - protein, 588 aa, Adiantum hispidulum
MAVDGASYRGAHSTALNALQALGRGFDVTCDIRLLHCKGSPGSRLVVVDDEHTAELKVLDSLGIPKVSTDIRARPEKPSRPSLGVQDFDQMSELFNKKLCIGGKIPSGIFNAMFSFSGSWQVDAAMTKSLALDGVSLPLYSVHLRPPFILREEVEKAVPSAWDPAALASFIEKYGTHIIMSVEVGGKDIVYVKQHQSSSLTKTEVELQLRKLVETRFQGTETSIAEVENKFQELPPLSSHKNHSKTVHAEGSSSLTGKEDITVIYRRRGGDDLVQDHLEWKKTVYTNPDVLSMSFFPISALLDPGPRRENLMRAIEAYTIYKPPLEELQYFLEFQVPRAWAPVTNQLGVPRKEPVCPSLQFSLMGPKLFINTDQVSVGRKPVTGLRLCLEGSKLNRLAVHVQHLTVLPKILQPHWDAYVTIGAPKWHGPEEQDSRWFEPVLWKNFAHVSTAPVEFSETWFGDASGAYIVTGAQLGVWDFGMKSVLHLKLLYSKVPDCTIRRSVWDQLPNGLQQSKGKKGTSSASSPAVSSDGTSSATQTSMKLSKFVDTTELARGPQDLPGHWLVTGAKLGVEKSNVFLRVKYSLLNY

SEQ ID NO: 715 - protein, 368 aa, Tupidanthus calyptratus
MEPRKNMSSDALNTTLWNSIQALGRGFDVTSDIRLLYCKGIPGSRLVQINDGVTKDLAVSDGFVVPNVSVDIESSRGEEVTETTAVCSFHEMAIYFNEKSEISGHVPLGSFNAMFNLTGSWQLDAATTKSLAMIGSVIPLYKVELANLDLVLNEEVKRAVPYSWDPASLASFIENYGTHIVTSATVGGRDVVYIRQHQSSPLSVSDIENYVKDIADQRYSGSRSNPSAAPLKYKDKDVTVIFRRRGGDDLEQSHVRWAETVQTSPDVINMTFIPIVSLLEGVPGIKHLACAIELYLEYKPPIEDLQYFLEFQIARVWAPEQSNIQRKDPVCPSLHFSLMGPKLYISPDQVPCLVFNTLLLNCCYEPMV

SEQ ID NO: 716 - protein, 300 aa, Tupidanthus calyptratus
MEPRKNMSSDALNTTLWNSIQALGRGFDVTSDIRLLYCKGIPGSRLVQINDRDAKDLRVSDEFVVPNVSVDIECSKGEKITETTPVCSFHEMAIYFNEKSEISGHVPLGSFNAMFNLTGSWQLDAATTKSLAMIGSVIPLYKVELANLDLVLNEEVKRAVPYSWDPASLASFIENYGTHIVTSATVGGRDVVYIRQHQSSPLSVSDIENYVKDIADQRYSGSRSNPSAAPLKYKDKDVTVIFRRRGGDDLEQSHVRWAETVQTSPDVINMTFIPIVSLLEGVPGIKHLACAIELYLECKI

SEQ ID NO: 717 - protein, 580 aa, Lygodium flexuosum
MAEEDILFRGARSTALNAIQALGRGFDVTCDIRLLYCKGTAGTHLVKVDEDHKGDLELPKGLRIPNVSIDIKARPEKCTRHSLGVLEFDQMSEAFNKLLAIPGKTPLGMFNAMFSFSGSWQADAASTKRLAVDGWIIPLYSVHLRPPFILCEEVKKTVPSSWDPAALASFIEKYGTHIIISVEVGGKDVIYVKQHQSSTLSKSEIEMHLKRLVETRFHGAQNSYMETEEKVEEPAIFTSHKIRSQPTHADSSSSLTGKEDITVIYRRRGGDDLIQDHFEWRDSIFGNPDVLTMSFFPIVLLLDSGSGMENLTRAIEAYLKYKPPLEELQYFLEFLAPRAWAPVASQVGPPRKEPVCPFLQFSLMGQKLFISTDQVSVGRKPITGLRLSLEGSKLNRLAVHVQHLTVLPKILQPHWDAYVAIGAPKWHGPEEQDSRWFEPVQWKNFAHVSTAPVEFSETWFGDASGAYIVTGAQLGVWDFGLKSVLHLKLLYSKVPGCTIRRSVWDHTPLPPSQQAKSNNSTASTVPAATTQTQKLLKFVDTSEMSRGPQDVPGHWLVTGAKLCVEKNKIFLRVKYSLLNY

SEQ ID NO: 718 - protein, 570 aa, Asplenium australasicum
MADEDSSLRGAFATAVNAVQALGRGFDVTCDIRLLYCKGALGSRLVVIDDDHTADLKLSDGLVIPNVSMDIRARLEKPSCPSLGVQGFDEMSEEFNKKLFIGGDIPSGMFNAMFNFSGSWQVDSSLTKRLAVDGLVLPLYSVHLRSPFILCEEVKNAVPNTWDPAALASFIEKYGTHIIRSVEVGGKDTIYVKQHPSSTLTKEEVESHLTKLVESRFQGRESDVIRRKDKENTDSSSSLTGKEDITVIYRRRGGDDLVQDHVDWKKTVNFNPDILSMAFFPIVLLLDPGTGREHLNRAIEAHLKYKPPLEELHYLLEFHVTRAWAPLANPAGPSRKEPVCPALQFSLMGPKLFINMSQVSVGRKPVTGLRLCLEGSKLNRLAVHVQHLTVLPKILQPHWDAYVAIGAPKWHGPEEQDSRWFEPVLWKNFAHVSTAPVEFSETWFGDASGAYIVTGAQLGVWDFGLKSVLHLKLLYSKVPGCTIRRSVWDHAPIGGQQQSKAKGASSASPAALDAAAAATQATQKLSKFVDTSEMARGPQDLPGHWLVTGAKLCVEKSNIFLRVKYSLLNY

SEQ ID NO: 719 - protein, 551 aa, Lygodium flexuosum
MAEEDILFRGARSTALNAIQALGRGFDVTCDIRLLYCKGTAGTHLVKVDEDHKGDLELPKGLRIPNVSIDIKARPEKCTRHSLGVLEFDQMSEAFNKLLAIPGKTPLGMFNAMFSFSGSWQADAASTKRLAVDGWIIPLYSVHLRPPFILCEEVKKTVPSSWDPAALASFIEKYGTHIIISVEVGGKDVIYVKQHQSSTLSKSEIEMHLKRLVETRFHGAQNSYMETEEKDITVIYRRRGGDDLIQDHFEWRDSIFGNPDVLTMSFFPIVLLLDSGSGMENLTRAIEAYLKYKPPLEELQYFLEFLAPRAWAPVASQVGPPRKEPVCPFLQFSLMGQKLFISTDQVSVGRKPITGLRLSLEGSKLNRLAVHVQHLTVLPKILQPHWDAYVAIGAPKWHGPEEQDSRWFEPVQWKNFAHVSTAPVEFSETWFGDASGAYIVTGAQLGVWDFGLKSVLHLKLLYSKVPGCTIRRSVWDHTPLPPSQQAKSNNSTASTVPAATTQTQKLLKFVDTSEMSRGPQDVPGHWLVTGAKLCVEKNKIFLRVKYSLLNY

SEQ ID NO: 720 - protein, 306 aa, Celosia argentea (Sylphid)
MTVKSSPDIIEMTFVPITDLIKDSARKEYLSRAINLYLEYKPAIEELRYFLEFQIPRVWAPVHNRLLRHQRKEPVCPSLQFSLMGQKLYISQEQVSVGRKPVTGLRLFLEGAKQNRLCIHLQHLASLPKILVPCWDTHVAIGAPKWMGPEEQDSRWFEPVKWKNFSHVSTAPIESHESFAGEVSGVHIVTGAQLGVWDFGSRNVLYMKLLYSRLPGCTIRRSLWDHTPIEKPWKAGGSAESTSGDSSSGGLSESVSSGNKLAKFVDMSEVTKGPEDLPGHWLVTGGKLGIEKGKIVLRVKYSLLNY

SEQ ID NO: 721 - protein, 493 aa, Ophioglossum pendulum
MAGYFNEVLSLSGKTASGVFNAVFNFSGSWNSDALATKSLAVDGWSIILYSLSLTRAPLTLIHEVKAAVPYTWDPAALASFIEKYGTHIVTSVSVGGKDAIYVKQHQSSTLTSTDVELHLKELRSIRFSPYGGHISFLGNEKVADQMLFSTQQILPQPCNSNGSSSFAGKEDITVIYRRRGGNDLVQGHDEWKKTVPTNPDVVTMTFVPITSLLENGPRSDHLSRAILVYLEYKPPIEELQYFLAFQVARVWAPVQNELGPPRREPVCPALQFSLMGPKLYISTEQVSVGRRPVTGLRLSLEGRNCNRLAVHVQHLTSLPKVLQPHWDAYIAIGAPKWHGPEEQDSRWFEPVLWRNFSHISTAPVEFNETWIGDASGAFVVTGAQLGVWDFGLKSVLYLRLLYSKVPGCTIRRSVWDHTPVSLNQNLKMDSSKVLNTVPTATSQTPKLLKFVDTTEMSRGAQDMPGHWLVTGAKLGVDKSKIFLRVRYSLLNY

SEQ ID NO: 722 - protein, 254 aa, Stenochiaena tenuifolia
MADKDASSRGARGTAVNAVQALGRGFDVTCDIRLLYCKGAPGSRLVIIDDDHTADLKLSDSLVIPKVSKDIKARLDKPYCPSPGAQDFDQMSELFNRKLGIGGRIPSGMFNAMFNFSGSWQVDASMTKSLAVDGVFIHLYSVHLKAPFILCEEVKKAVPSTWDPAALASFIEKYGTHVIIGVEVGGKDIIYVKQHQSSSLTKSEVDLHLKKLVEMRFQGKESKELALNPQKNRSQFVHADSSSSLTGKEDITVI

SEQ ID NO: 723 - protein, 581 aa, Equisetum arvense
MAEDEPSRTLGTNVIQALGQGFDITSDIRLSYCKGSRLVQIDAEQTSDLVLPGVTASIPQVPTEIQCLPGRTMRHGTGVLDFEKMAQRFNKALSVNGKIPSGLFNAMFSFSGSWRADAHVTKSLALDGWFIMLYNLKLAHSSFKLRGEIKREVPSTWDPSALSSFIERHGTHIVTSVTVGGKDAIYVKQHQSSSLTSMEIESYLKELGDRRFLARSKHSAFEMKEKGAGQSFPPPAQSLLPTSASDSSSSLTGKEDVTVIYRRRGGDDLEQNHEEWKYTIFSNPDVISMTFIPIASLLEGCPGKEHLIRAIDVYLEYKPPIEELQYFLEFQVAKAWAPVQNEGRLPRKEPVCPSLQFSLMGPKLYINTEQVSVGRRPVIGLRLCLEGSKVNRLSVHVLHLVALPKLLQPHWDSYVAIGPPKWHGPEEQDSRWFEPIQWKNFSHVSTAPIEYSEGWMGDVSGAHVVTGAQLGVWDFGPKSVLHLRLLYSKVPGCTIRRSIWDYNPNPSSFNPSTNPSKASKEVNASSSSNAPQVNKLTKFVDTEEMVKGPQDMPGHWLVTGAKLGVEKSKIFLRVKYSLLNY

SEQ ID NO: 724 - protein, 585 aa, Polystichum polyblepharum (C.)
MADEDASFRGAHGTAVNAVQALGRGFDVTCDIRLLYCKSTPGSRLVVINDDHTANLNVSDGLVIPNVSKDIKARLEKPFRPSHGVQDFDQMSELFNKKLGIGGKIPSGMFNAMFNFSGSWQVDSSITKSLSVDGVVIPLYSVHLRPPFILREEVKMAVPSTWDPPALASFIEKYGTHIIISVEVGGKDTIYVKQHLSSSLTKSEVDSHVKKLVETRFQGMESGVTQAKDKFQELALTNPQKNRSQLVHDDGSSSLTSKEDITVIYRRRGGDDLVQDHLEWKKTVNTNPDILSMAFFPIVVLLDAGSGREHLNRAIEAHLQYKPPLEELQYFLEFQVTRAWAPVANQVGLPRKEPVCPSLQFSLMGPKLFISTDQVSVGRKPVTGLRLCLEGSKLNRLAVHLQHLTVLPKILQPHWDAYVAIGAPKWHGPEEQDSRWFEPVLWKNFAHVSTAPVEFSETWFGDASGAYIVTGAQLGVWDFGLKSVLHLKLLYSKVPGCTIRRSVWDHTPIGQQLSKAKKGTSSATAAAAAAATVTQTTQKLSKFVDTTEMARGPQDLPGHWLVTGAKLCVEKSNIFLRVKYSLLNY

SEQ ID NO: 725 - protein, 361 aa, Ophioglossum pendulum
MEDDDSALKVSIAVNALQTLGRGFDLTCDIRIIYCKGTEGSRLLEIDEEHTKNLELPGGISIPDVSRDIKCVQGTEKHFSTGVLHFEQMAGYFNEVLSLSGKTASGVFNAVFNFSGSWNSDALATKSLAVDGWSIILYSLSLTRAPLTLIHEVKAAVPYTWDPAALASFIEKYGTHIVTSVSVGGKDAIYVKQHQSSTLTSTDVELHLKELRSIRFSPYGGHISFLGNEKVADQMLFSTQQILPQPCNSNGSSSFAGKEDITVIYRRRGGNDLVKGHDEWKKTVPTNPDVVTMTFIPITSLLEDGPCKDHLNRAILVYLEYKPPIEELQYFLAFQVARVWAPVQNELGPPRREPVCPALQL

SEQ ID NO: 726 - protein, 566 aa, Rumohra adiantiformis
MADEDASFRGARGTAVNAVQALGRGFDVTCDIRLLYCKGTPGSRLVVIDDNHTTNLKVSDGLVIPDVSTDIKARLEKPSRPSLGVQDFDQMSELFNNKLGIGGKIPSGMFNAMFNFSGSWQVDSSITKGLALDGVFIPLYSVHLRSPFILRDEVKMAVPSTWDPPALASFIEKYGTHIIISVEVGGKDIVYVKQHPSSSLTKSEVDSHLRKLVETRFQGMESGVNQAKDKFQLVHADGSSSLTGKEDITVIYRRRGGDDLVQDHLEWKKTVNLNPDILSMAFFPIVLLLDAGSGREHVNRAIEAHLKYKPPLEELQFFLEFQVSRAWAPAANQVGLPRKEPVCPSLQFSLMGPKLFISTDQVSVGRKPVTGLRLCLEGSKLNRLAVHLEHLTVLPKILQPHWDAYVAIGAPKWHGPEEQDSRWFEPVLWKNFAHVSTAPVEFSETWFGDASGAYIVTGAQLGVWDFGLKSVLHLKLLYSKVPGCTIRRSVWDHTPLGQQLSKEKKGTSSAAATATQTTQKLSKFVDTTEMARGPQDLPGHWLVTGAKLCVEKSNIFLRVKYSLLNY

SEQ ID NO: 727 - protein, 429 aa, Platycerium wandae
MANEDVSRGARATAINAVQAIGRGFDITCDIRLLYCKGTPGSRLVVIDDDHTADLQVADDLVIQNVSKDIKARIEKPSRAYQGILDFDQMSELFNKKLSIDGKVPSGMFNAMFNFSGSWQVDSSSTKSLATDGMHIPLYSVHLRPPFILCEEVKRAVPSTWDPPALASFIEKYGTHIIRSVEAGGKDIIYMKQHSSSILSKTEVETHLKKLVEARFQDLDLQSNDEELKLSNPQKHRSQLVHADGSSSLTGKEDITVIYRRRGGDDLVQDPREWKKTVKSNPDILTMSFFPIVLLLDPGPGREHLNRAMDAHLKYKPPLEELQYFLEFQVTRAWAPVANQVGLPRKEPVCPSLQFSLMGPKLYISTDQVSVGRKPVTGLRLCLEGSKLNRLAVYVEHLTVLPKILQPHWDAYVAIGAPKWHGPEEQDST

SEQ ID NO: 728 - protein, 416 aa, Tupidanthus calyptratus
MEENAAALHTAMNSVQALGRGFDVNFDIRLLYCKGVAGSRIVEIDEEHTRDMCLYDGLVVPNVSKDVHNSQETIGRDGSGVCNYFEMVEYINKKANLSENVPVGCFNAAFNFTGCKHIDAAATKTLCLDGFFIPLAKVQLVKSATKTLCLDGFFIPLSKVQLIMSQLVLQENVIRAVPASWDPPALASFIENFGTHVIVSVTIGGKDVIYVKQHQSSSLSKVEIKNYAQDIGNQRFSTTENHTISGLLKYKDKGVDPSLYNSQGVHPQPSTATSLIGNGKEDVTVIFRRRGGDDLEQSHTQWARTVRSSPDVIEMSFFPIIPLLEGVTGKEHLAQAIDLYLEYKPQIEELRYFLEFQVPRIWAPIQDRPPGYQRKEPVCPIFAVQHDGAKALHQPRASTFLCLCEHVTVLVKTGLH

SEQ ID NO: 729 - protein, 572 aa, Asplenium nidus var plicatum
MADEDSSLRGAFATAVNAVQALGRGFDVTCDIRLLYCKGTPGSRLVVIDDDHTADLKLSDGLVIPNVSMDIRARLEKPSRPSLGVQGFDEMSEEFNKKLSIGGNIPSGMFNAMFNFSGSWQVDSSLTKRLAVDGLVLPLYSVHLRSPFILCEEVKKAVPNIWDPAALASFIEKYGTHIIRSVEVGGKDTIYMKQHPSSTLTKEEVESHLKKLVESRFQGRESDVIRRKDKENTDSSSSLTGKEDITVIYRRRGGDDLVQDHVEWKKTVNFNPDILSMAFFPIVLLLDAGSGREHLNRAIEAHLKYKPPLEELHYFLEFQLTRAWAPLVNPAGPPRKEPVCPALQFSLMGPKLFINTSQVSVGRKPVTGLRLSLEGSKLNRLAVHVQHLAVLPKILQPHWDAYVAIGAPKWHGPEEQDSRWFEPVLWKNFAHVSTAPVEFSETWFGDASGAFIVTGAQLGVWDFGLKSVLHLKLLYSKVPGCTIRRSVWDHAPIGGQQQGKAKGASSASPAAPDAAAAAAATQATQKLSKFVDTSEMARGPQDLPGHWLVTGAKLCVEKSNIFLRVKYSLLNY

SEQ ID NO: 730 - protein, 381 aa, Pandorea pandorana (Golden Showers)
MGENAAALHTAINSVQALGRGFDVNYDTRLLYCKGVAGSRIVDIDEEHPRDLYLSDNLVVPDVSREIKNSQEAGGRDGFGVCSYNEMAEYFNKKASLSGHTPLGSFNAAFSFTGSRHIDASSTKSLCMDGFFIPVAKIHLGNSPMVLNENVRRAVPKSWDPPALASFIENFGTHVITSVTIGGKDVIYVKQHLSSPLSIVEIKNYVQDIGNQRFSSTEGITSSGPLKYKDKGSDPSLFNSQGIYPQPASAPYLSGNGKEDVTVIFRRRGGDDLEQSHTQWAKTVQSSPDVIEMSFFPITELLDGVRGKEHLARAIALYLENKPQIEELRYFLEFQVPRIWAPVQDRFPGQQRKEPVCPSLQFSMMGQKLYVSQEQVRVLIY

SEQ ID NO: 731 - protein, 471 aa, Tupidanthus calyptratus
MEENAAALHTAMNSVQALGRGFDVNFDIRLLYCKGVAGSRIVEIDEEHTRDMCLYDGLVVPNVSKDVHNSQETIGRDGSGVCNYFEMVEYINKKANLSENVPVGCFNAAFNFTGCKHIDAAATKTLCLDGFFIPLAKVQLVKSQLVLQENVIRAVPASWDPPALASFIENFGTHVIVSVTIGGKDVIYVKQHQSSPLSKVEIKKYVQDIGNQRFSTTENHTISGLLKYKDKGVDPSLYNSQGVHPQPSTATSLIGNGKEDVTVIFRRRGGDDLEQSHTQWARTVRSSPDVIEMSFFPIIPLLEGVTGKEHLAQAIDLYLEYKPQIEELRYFLEFQVPRIWAPIQDRPPGYQRKEPVCPSLQFSMMGQKLYISQEQVSVGRKPVTGMRLCLEGSKQNRLIIHLQHLACLPKILQPYWDTHVSIGAPKWQGPEEQDSRWFEPVKWKNFSHVSTAPIECPETFVGDQSGCQAAR

SEQ ID NO: 732 - protein, 581 aa, Asplenium antiquum (Crissie)
MADEDASSRGALVTAVNAVQALGRGFDVTCDIRLLYCKGTPGSRLVVVDDDHNTYLRVSDGVVIPNVSADIRARLEKPSRPTLGVQGFDEMSEEFNKKLFIGGNIPSGMFNAMFNFSGSWQVDSSMTKSLAIDGLVLPLYSVHLRSPFILCEELKNAVPNTWDPAALASFIEKYGTHIIRSVEVGGKDIIYVKQHPSSTLTKHEVESHLKKLVESRFQAMESDVIWRKDKENTESSSSLTGKEDITVIYRRRGGDDLVQDHVEWKKTVNSNPDILSMAFFPIVLLLDPGTGREHLNRAIEAHLKYKPPLEELHYFLEFHVTRAWAPLANPVGPPRKEPICPALQFSLMGPKLFINTSQVSVGRKPVTGLRLCLEGSKLNRLAVLVQHLTVLPKILQPHWDAYVAIGAPKWHGPEEQDSRWFEPVLWKNFAHVSTAPVEFSETWFGDASGAYIVTGAQLGVWDFGLKSVLHLKLLYSKVPGCTIRRSVWDHTPIGQQQSKAKGASSASPATGSAAPDAVGASVAAAAAAATQATQKLSKFVDTSEMARGPQDLPGHWLVTGAKLCVGKSKIFLRVKYSLLNY

SEQ ID NO: 733 - protein, 505 aa, Davallia fejeensis
MFLRTLRQGWRNHLVPIRACKISIRCQSCSTRSCLLKERFRQEWQVDSSITKSLAIDGMHIPLYSVHLRSPFILCDEVKRAVPSTWDPPALASFIEKYGTHIIRSVEVGGKDIIYVKQHPSSNLTKSEVETHLKKLVETRFQGMESGLVHQKDEKNRSQLVHADGSSSLTGKEDITVIYRRRGGDDLVQDPLEWKKTVNSNPDILTMAFFPIVLLLDPGPGREHLHRAIEAHLKYKPPLEELQYFLEFQVTRAWAPLSNQVGLPRKEPVCPSLQFSLMGPKLFISTDQVSVGRKPVTGLRLCLEGSKLNRLAVHVEHLTVLPKILQPHWDAYVAIGAPKWHGPEEQDSRWFEPVLWKNFAHVSTAPVEFSETWFGDASGAYIVTGAQLGVWDFGVKSVLHLKLLYSKVPRCTIRRSVWDHTPIGQQLSKAKKGASSTAAAAVAAAASIGAAATSQAMQKLSKFVDTTEMSRGPQDLPGHWLVTGAKLCVEKSNIFLRVKYSLLNY

SEQ ID NO: 734 - protein, 581 aa, Doellingeria umbellata
MEDNAAALHTAKNAVQALGKGFDVNFDTRLLYCKGVAGSKVVEIDEEHKRDLWLYDNLVVPDVSRDIENYQEPVNRNSSGVCNYHEMVEYFNKRANLAGNVPLGSFNAAFSFTGSKHIDAAATKTLCMDGHFIPLSKFELTKSSLVLQESVKRAVPISWDPPALASFIENFGTHVITSVTIGGKNVIYVKQHLSSPLSTVEIKNYVQDIGNQRFTNTENLTDSGLLRYKEKGGDPSLFSSQGIYPQPTNASSLSGNAKEDVTVIFRRRGGDDLEQSHTKWEKTVKYSPDVIGMQFVPIASLLEGLPGKEHLTRAISLYLEYKPQIEELRYFLEFQVPRVWAPLQDRLPGHQRKEPVCPSLQFSMMGQKLYVSQDQISVGRKPVTGIRLFLEGSKHNRLSIHIQHLQSLPKILRPYWDTHVAIGAPKWLGPEEQDSRWFEPVKWKNFSHVSTAPIESPEAFIGDMCGVHIVTGAQLGVWDFGSRNVLYMKLLYSRLPGCTVRRSLWDHSPNDKSKRSTGHGNSVGDSSSGSGNNNKLAKFVDMTEMSKGPADPPGHWVVTGGKLGVEKGKIVLRLKYSLLNY

SEQ ID NO: 735 - protein, 435 aa, Platycerium bifurcatum
MANEDVSRGARATAINAVQAIGRGFDITCDIRLLYCKGTPGSRLVVIDDDHTADLQVADDLVIQNVSKDIKARIEKPSRAYQGILDFDQMSELFNKKLSIDGKVPSGMFNAMFNFSGSWQVDSSSTKSLATDGMHIPLYSVHLRPPFILCEEVKRAVPSTWDPPALASFIEKYGTHIIRSVEAGGKDIIYMKQHSSSILSKTEVETHLKKLVEARFQDLDLQSNDEELKLSNPQKHRSQLVHADGSSSLTGKEDITVIYRRRGGDDLVQDPREWKKTVKSNPDILTMSFFPIVLLLDPGPGREHLNRAMDAHLKYKPPLEELQYFLEFQVTRAWAPVANQVGLPRKEPVCPSLQFSLMGPKLYISTDQVSVGRKPVTGLRLCLEGSKLNRLAVHVEHLTVLPKILQPHWDGASSLSGRKQAKSACRPCRAPYCAS

SEQ ID NO: 736 - protein, 365 aa, Asplenium prolongatum x Asplenium antiquum (Kurata)
MESDVNQRKDKENSESSSSLTGKEDITVIYRRRGGDDLVQDHVEWKKTVNFNPDILSMAFFPIVLLLDPGTGREHLNRAIEAHLKYKPPLEELHYFLEFHVTRAWAPLANPVGPPRKEPICPGLQFSLMGPKLFINTSQVSVGRKPVTGLRLCLEGSKLNRLAVHVQHLTVLPKILQPHWDAYVAIGAPKWHGPEEQDSRWFEPVLWKNFAHVSTAPVEFSETWFGDASGAYIVTGAQLGVWDFGLKSVLHLKLLYSKVPGCTIRRSVWDHTPIGQQQSKAKGASSASPAAGTAAPDAAAASVAAAAATQATQKLSVCGYVRDGQRPTRPAWPLASHWRKAVRGEEQNLSESEVLSSELLEAKWP

SEQ ID NO: 737 - protein, 421 aa, Verbascum chaixii (Vill)
MRSKLEILRFLDLMRSLMFLLTLNALKGRVLITRHLFGAFMSFIENYGTHIVTSATIGGRDVVYIRQHQSSPLSASDIENYVKDIGDQRFSDSKGNSSAGALKYKDKDVTVIFRRRGGDDLEQSYAKWAKTVEGAPDVITMTFTPIVSLLEGVAGIKHLARAIELYLEYKPPIEDLQYFLDFQISRAWAPEQNNNLQRKEPVCSSLQFSLMGPKLYISPDQVTVGRKPVTGLKLSLEGLKQNRLAINLQHLVSLPKILQPHWDTHIAIGAPRWQGPEEQDSRWFEPIKWKNFSHVSTSPIECTDTCIGDLSGVHIVTGAQLGVWDFGARSVLHLKLLFSKVPGCTIRRSVWDHSPSNLQKGDGSSSSNESSQMGKLAKIVDMTEMSKGPQDMPGHWLVTGAKLGVDKGKIVLRVKYSLLNY

SEQ ID NO: 738 - protein, 493 aa, Ophioglossum pendulum
MAGYFNEVLSLSGKTASGVFNAVFNFSGSWNSDALATKSLAVDGWSIILYSLSLTRAPLTLIHEVKAAVPYTWDPAALASFIEKYGTHIVTSVSVGGKDAIYVKQHQSSTLTSTDVELHLKELRSIRFSPYGGHISFLGNEKVADQMLFSTQQILPQPCNSNGSSSFAGKEDITVIYRRRGGNDLVKGHDEWKKTVPTNPDVVTMTFIPITSLLEDGPCKDHLNRAILVYLEYKPPIEELQYFLAFQVARVWAPVQNELGPPRREPVCPALQFSLMGPKLYISTEQVSVGRRPVTGLRLSLEGRNCNRLAVHVQHLTSLPKVLQPHWDAYIAIGAPKWHGPEEQDSRWFEPVLWRNFSHISTAPVEFNETWIGDASGAFVVTGAQLGVWDFGLKSVLYLRLLYSKVPGCTIRRSVWDHTPVSLNQNLKMDSSKVLNTVPTATSQTPKLLKFVDTTEMSRGAQDMPGHWLVTGAKLGVDKSKIFLRVRYSLLNY

SEQ ID NO: 739 - protein, 612 aa, Sphaeropteris cooperi
MAEDDTSFRGARATALNALQALGRGFDVTCDIRLLYCKGAPAGARLVKIDEENCWDLALSDGLRIPNVSVGIKARQEECKRLSLGVSDFDQMSELFNRKLGIMGKTPLGMFNAMFSFSGSSQIDASMTKSLAVDGWVIPLYSVHLRAPFMLCEEVRKAVPTTWDPSALASFIEKYGTHIIIGVEVGGKDVIYVKQHQSSILTKSEIELHLKRLVETRFQGVENSVFKAEDKLQELAMFTTQKIRSQPLHADGSSSLTGKEDITVIYRRRGGDDLVQDHFEWRKTVHSNPDVLSMSFFPIVGLLEPGSNVDNLNRAIDAYLTYKPPLEELQYFLEFQVPRAWAPVVNQVGPPRKEPVCPPLQFSLMGPKLFISTDQISVGRKPVTGLRLCLEGSKLNRLAIHLQHLTVLPKILQPHWDLEGSKLNRLAVHVQHLTVLPKILQPHWDAYVAIGAPKWHGPEEQDSRWFEPVLWKNFAHVSTAPVEFNETWFGDASGAYIVTGAQLGVWDFGLKSVLHLKLLYSKVPGCTIRRSVWDHTPAPSGQQQQPKAKKGALSISSAAVPQTTQKLSKFVDTTELMRGPQDLPGHWLVTGAKLCVEKSNIFLRVKYSLLNY

SEQ ID NO: 740 - protein, 584 aa, Tupidanthus calyptratus
MEENAAALHTAMNSVQALGRGFDVNFDIRLLYCKGVAGSRIVEIDEEHTRDMCLYDGLVVPNVSKDVHNSQETIGRDGSGVCNYFEMVEYINKKANLSENVPVGCFNAAFNFTGCKHIDAAATKTLCLDGFFIPLAKVQLVKSQLVLQENVIRAVPASWDPPALASFIENFGTHVIVSVTIGGKDVIYVKQHQSSPLSKVEIKKYVQDIGNQRFSTTENHTISGLLKYKDKGVDPSLYNSQGVHPQPSTATSLIGNGKEDVTVIFRRRGGDDLEQSHTQWARTVRSSPDVIEMSFFPIIPLLEGVTGKEHLAQAIDLYLEYKPQIEELRYFLEFQVPRIWAPIQDRPPGYQRKEPVCPSLQFSMMGQKLYISQEQVSVGRKPVTGMRLCLEGSKQNRLIIHLQHLACLPKILQPYWDTHVSIGAPKWQGPEEQDSRWFEPVKWKNFSHVSTAPIECPETFVGDQSGVYIVTGAQLGVWDFGSRNVLYMKLLFSRLPGCTIRRSLWDHKPNEESKKSAATGNNSGDSSSASGETLAGNKIAKSVDMSAMSKGPQDAPGHWLVTGGKLGVEKGKIVLRVKYSLLNY

SEQ ID NO: 741 - protein, 386 aa, Celosia argentea (Sylphid)
MEMKSYVQEIGNQRFMPKESHTSSGPIRVKEKVGDSGLFNSQGIYPQPTSVPSVNGKEDITVIFRRRGGDDLEHSHRQWAMTVKSSPDIIEMTFVPITDLIKDSARKEYLSRAINLYLEYKPAIEELRYFLEFQIPRVWAPVHNRLLRHQRKEPVCPSLQFSLMGQKLYISQEQVSVGRKPVTGLRLFLEGAKQNRLCIHLQHLASLPKILVPCWDTHVAIGAPKWMGPEEQDSRWFEPVKWKNFSHVSTAPIESHESFAGEVSGVHIVTGAQLGVWDFGSRNVLYMKLLYSRLPGCTIRRSLWDHTPIEKPWKAGGSAESTSGDSSSGGSSESVSAGNKLVKFLDMSEMTKGPEDLPGHWLVTGGKLGIEKGKIVLRVKYSLLNY

SEQ ID NO: 742 - protein, 347 aa, Verbascum chaixii (Vill)
MEENAAALHTAINSVQALGRGFDVNYDTRLLYCKGVAGSRIVDIDEEHPRDLYLSDNLVVPNVSRDIKSSVEAGGRDGFGVCSYSEMVEYFNRKADLSGQTPLGSFNVAFSYTGSKHIDAASTKSLCMDGFFIPLAKIQLVKASMSLNENVRRAVPTSWDPPGLASFIENFGTHVITSVTIGGKDVIYVKQHLSSPLAMVEIKNYVQDIGNQRFSSPEGLTNSGLLRYKDKGSDPSLFNSQGIYPQPASAPYLSWSGKEDVTVIFRRRGGDDLEQSHIQWAKTVRSSPDVIEMSFFPITELLDGVRGKEHLARAISLYLEYKPQIEELRYFLEFPDSCLTLNCSCTT

SEQ ID NO: 743 - protein, 300 aa, Tupidanthus calyptratus
MEPRKNMSSDALNTTLWNSIQALGRGFDVTSDIRLLYCKGIPGSRLVQINDGVTKDLAVSDGFVVPNVSVDIESSRGEEVTETTAVCSFHEMAIYFNEKSEISGDVPLGSFNAMFNLTGSWQLDAATTKSLAMIGSVIPLYKVELANLDLVLNEEVKRAVPYSWDPASLASFIENYGTHIVTSATVGGRDVVYIRQHQSSPLSVSDIENYVKDIADQRYSESRSHPSAAPLKYKDKDVTVIFRRRGGDDLEQSHIRWAETVQTSPDVINMTFIPIVSLLEGVPGIKHLACAIELYLECKI

SEQ ID NO: 744 - protein, 410 aa, Tupidanthus calyptratus
MEENAAALHTAMNSVQALGRGFDVNFDIRLLYCKGVAGSRIVEIDEEHTRDMCLYDGLVVPNVSKDVHNSQETIGRDGSGVCNYFEMVEYINKKANLSENVPVGCFNAAFNFTGCKHIDAAATKTLCLDGFFIPLSKVQLIKSQLVLQENVIDGFFIPLAKVQLVKSQLVLQENVIRAVPASWDPPALASFIENFGTHVIVSVTIGGKDVIYVKQHQSSPLSKVEIKKYVQDIGNQRFSTTENHTISGLLKYKDKGVDPSLYNSQGVHPQPSTATSLIGNGKEDVTVIFRRRGGDDLEQSHTQWARTVRSSPDVIEMSFFPIIPLLEGVTGKEHLAQAIDLYLEYKPQIEELRYFLEFQVPRIWAPIQDRPPGYQRKEPVCPSLQFSMMGQKLYISQEQVSVGRKPVTGS

SEQ ID NO: 745 - protein, 560 aa, Tupidanthus calyptratus
MEPRKNMSSDALNTTLWNSIQALGRGFDVTSDIRLLYCKGIPGSRLVQINDGVTKDLAVSDGFVVPNVSVDIESSRGEEVTETTAVCSFHEMAIYFNEKSEISGHVPLGSFNAMFNLTGSWQLDAATTKSLAMIGSVIPLYKVELANLDLVLNEEVKRAVPYSWDPASLASFIENYGTHIVTSATVGGRDVVYIRQHQSSPLSVSDIENYVKDIADQRYSGSRSNPSAAPLKYKDKDVTVIFRRRGGDDLEQSHVRWAETVQTSPDVINMTFIPIVSLLEGVPGIKHLACAIELYLEYKPPIEDLQYFLEFQIARVWAPEQSNIQRKDPVCPSLHFSLMGPKLYISPDQVTVGRKPVTGLRLTLEGTKQNRLAIHLQHLVSLPKILQPHWDAHMAIGAPKWQGPEEQDSRWFEPIKWKNFSHVSTAPIEHTETCIGDLSGVYIVTGAQFGVWDFGASKSVLHLKLLFSKVPGCTIRRTVWDHSPSNVSGVQRSNGASTSLLHERTTDSSGHIGKLAKIVDMTEMSKGPQDIPGHWLVTGAKLGVDKGKIVLRIKYSLLNY

SEQ ID NO: 746 - protein, 276 aa, Pellaea rotundifolia
MADEDASLRGAHATALNAIQAVGRGFDVTCDIRLLYCKGTPGSRLVVVDDEHTTDLKLLDGLDIPKVSTDIRARQEKPSRASLGVQDFDQMSELFNKKLNIRGKIPSGLFNSMFSFSGSWQVDASMTKSLALDGVLLPLYSVHLRSPFILCEEVKKAVPSTWDPAALASFIEKYGTHVILSVEVGGKDIVYVKQHQSSSLTKSEVELQLRKLVETRFQGMEMGIADVNNKLQELPPLSSQKNHSKIVHADGSSSLTGKEDITVIYRRRTSCKSCHH

SEQ ID NO: 747 - protein, 545 aa, Matteuccia struthiopteris
MADEDASSRGARVTAVNAVQALGRGFDVTCDIRHLYCKGTPGSRLVVIDDDHTADLKVSDSLVIPNVSADIKARMEKPSRPSLGVQDFDQMSELFNKKFCIGGKIPSGMFNAMFNFSGSWQVDSSMTKSLAVDGVVIPLYSVHLRAPFILCEEVKKAVPSTWDPAALASFIEKYGTHVIISVEVGGKDVIYVKQPQSSSLTKSEVDSHLKKLVETRFQGMESGVTQAKDKFQELALNQQKNRSQLVHADGSSSLTGKEDITVIYRRRGGDDLVQDHLEWKKTVYSNPDILSMAFFPIVLLLDGGSGREHLNRAIEAHLKYKPPLEELQYFLEFQVTRAWAPVANQVGLPRKEPVCPTLQFSLMGPKLFISTDQVSVGRKPVTGLRLCLEGSKLNRLAVHVQHLTVLPKILQPHWDAYVAIGAPKWHGPEEQDSRWFEPVLWKNFAHVSTAPVEFSETWFGDASGAYIVTGAQLGVWDFGLKSVLHLKLLYSKVPGCTIRRSVWDHTPTGQQQSKAKMGTSSASPDCCCCCCCCCYTNDSETLQVC

SEQ ID NO: 748 - protein, 300 aa, Tupidanthus calyptratus
MEPRKNMSSDALNTTLWNSIQALGRGFDVTSDIRLLYCKGIPGSRLVQINDGVTKDLAVSDGFVVPNVSVDIESSRGEEVTETTAVCSFHEMAIYFNEKSEISGHVPLGSFNAMFNLTGSWQLDAATTKSLAMIGSVIPLYKVELANLDLVLNEEVKRAVPYSWDPASLASFIENYGTHIVTSATVGGRDVVYIRQHQSSPLSVSDIENYVKDIADQRYSGSRSNPSAAPLKYKDKDVTVIFRRRGGDDLEQSHVRWAETVQTSPDVINMTFIPIVSLLEGVPGIKHLACAIELYLECKI

SEQ ID NO: 749 - protein, 302 aa, Verbascum chaixii (Vill)
MASMGSENALITTLCNSIQALGRGFDVTSDIRLLYCKGAPGSRLVHINEEQTRNLEISGSYAIPNVSVDIECSQGQSFNNKTPVWSFHEMAKYFNEKSGLPGNIPLGCFNAMFNFSGSRQLDAAATKSLAMVGYIIPLFTVKLAKPDLILHDQIKRAVPYSWDPASLASFIENYGTHIVTSATIGGRDVVYIRQHQSSPLSTSDIENYVKDIGDQRFSDSKGNSSAGSLKYKDKDVTVIFRRRGGDDLEQSYEKWAKSVEGAPDVISMTFTPIVSLLEGVPGIKHLARAIELYLECKNLILC

SEQ ID NO: 750 - protein, 561 aa, Doellingeria umbellata
MNDTKMEDLSISKNDNNNNNNALITTLKNSIQALGRGFDVTSDIRLLYCKGPPGSCLVHLDSQHTRHLVFSDDGFLSIPNVSVDVDFSKGQPTIEATPVSTFHQMAKYFNMKSNLSGDVPLGSFNAMFNFTGSRQVDAASTKSLAMIGYIVPLFEVRLEISDLVLLQEVKQAVPYSWDPASLASFIENYGTHIVTSATVGGRDVVYIKQHQSSPLSILDIDNYVKDIGDHRFVDSKSQSSSGPLKYKDKDVTVIFRRRGGDDLEQSHAKWVETVETAPDVINMTFTPIVSLLDGVPGIKHLSKAIELYLEYKPPIEDLQYFLEFQISRVWAPEQSNIQRKEPVCPSLQFSLMGPKLYISLEQVTVGRKPVTGLKLNLEGSKQNRLAIHLQHLVSLPKILQPHWDAHMAIGAPKWQGPEEQDSRWFEPIKWKNFSHVSTAPIEHTETYIGDLSGVHIVTGAQFGVWDFGARSVLHLKLLFSKVPGCTIRRSVWDHSPANLQKHGEDKGDSSSQSGKLAKIVDMTEMSKGPQDVPGHWLVTGAKLGVDKGRIVLRIKYSLLNY

SEQ ID NO: 751 - protein, 428 aa, Sphaeropteris cooperi
MAEDDTSFRGARATALNALQALGRGFDVTCDIRLLYCKGAPAGARLVKIDEENCWDLALSDGLRIPNVSVGIKARQEECKRLSLGVSDFDQMSELFNRKLGIMGKTPLGMFNAMFSFSGSSQIDASMTKSLAVDGWVIPLYSVHLRAPFMLCEEVRKAVPTTWDPSALASFIEKYGTHIIIGVEVGGKDVIYVKQHQSSILTKSEIELHLKRLVETRFQGVENSVFKAEDKLQELAMFTTQKIRSQPLHADGSSSLTGKEDITVIYRRRGGDDLVQDHIEWKKTVYTNPDVLSMSFSSIVLLLEPGSGRDNLNRAIEAYLTYKPPLEELHYFLEFQVPRAWAPVVNQVGPPRKEPVCPPLQFSLMGPKLFISTDQISVGRKPVTGLRLCLEGSKLNRLAIHLQHLTVLPKILQPHWDSYVAIGAPKWV

SEQ ID NO: 752 - protein, 469 aa, Asplenium antiquum (makino)
MFNAMFNFSGSWQVDSSLTKRLAVDGLVLPLYSVHLRSPFILCEEVKKAVPNIWDPVALASFIEKYGTHIIRSVEVGGKDTIYVKQHPSSTLTKEEVESHLTKLVESRFQGRESDVIRRKDKENTDSSSSLTGKEDITVIYRRRGGDDLVQDHVDWKKTVNFNPDILSMAFFPIVLLLDAGSGREHLNRAIEAHLKYKPPLEELHYFLEFHVARAWAPLANPVGPPRKEPICPALQFSLMGPKLFINTSQVSVGRKPVTGLRLCLEGSKLNRLAVHVQHLTVLPKILQPHWDAYVAIGAPKWHGPEEQDSRWFEPVLWKNFAHVSTAPVEFSETWFGDASGAYIVTGAQLGVWDFGLKSVLHLKLLYSKVPGCTIRRSVWDHTPTGQQQSKGTKGTSSASPAAGTAAAPAAAAAAAATPATQKLSKFVDMSEMARGPQDLPGHWLVTGAKLCVEKSNIFLRVKYSLLNY

SEQ ID NO: 753 - protein, 581 aa, Equisetum
MAEDEPSCTLATSVIQALGQGFDITSDIRLSYCKGSRLVQIDTEQTSDLVLPGVTASIPQVPTEIKCLPGRIMRHGTGVLDFEKMAQRFNKALSVNGKIPSGLFNAMFSFSGSWRADAHVTKSLALDGWFIMLYNLKLAQSSFKLRGEIKREVPSTWDPAALASFIERHGTHIVTSVTVGGKDAIYVKQHQSSSLTSMEIESYLKELGDRRFLARSKHSAFEMKEKGAGQSFPPPAQSLLPTSASDSSSSLTGKEDVTVIYRRRGGDDLVQNHEEWKYTIFSNPDVISMTFIPIASLLEGCPGKEHLIRAIDIYLEYKPPIEELQYFLEFQVAKVWAPVQNEGRLPRKEPVCPSLQFSLMGPKLYINTEQVSVGRRPVIGLRLCLEGSKVNRLSVHVLHLVALPKLLQPHWDSYVAIGPPKWHGPEEQDSRWFEPIQWKNFSHVSTAPIEYSEGWMGDDSGAHVVTGAQLGVWDFGPKSVLHLRLLYSKVPGCTIRRSIWDYNPNPSSFNPSINPSKASKEANASSSSNAPQVNKLAKFVDTEEMVKGPQDMPGHWLVTGAKLGVEKSKIFLRVKYSLLNY

SEQ ID NO: 754 - protein, 265 aa, Asplenium prolongatum x Asplenium antiquum (Kurata)
MAEGDSSSRGAFVTGVNAVQALGRGFDATCDIRLLYCKGTPGTRLVVIDDDHTTDLKVSDGVVIPNVSTDIRARLEKPYRPSLGVQGFHEMSEEFNKKLSIGGNIPSGMFNAMFNFSGSWQVDSSMTKRLAVDGLVLPLYSVHLRSPFILCEEVKKAVPNIWDPAALASFIEKYGTHIIRSVDVGGKDIIYVKQHPSSTLTKHEVESHLKKLVESRFQAMESDVNQRKDKENSESSSSLTGKEDITVIYRRRGGDDLVQDHVEWK

SEQ ID NO: 755 - protein, 587 aa, Symphoricarpos x chenaultii (Hancock)
MEENAAALHTAINSVGALGRGFDVNFDTRLLYCKGVAGSRVVEIDEEHSWDLRLYDSLVVPNVPREIKNSHETSGRDGFGVCSYHEMAEYFNKKANLSGHVPLGSFNAAFSFTGSKHIDAAATKTLCMDGYFIPLAKVQLNKSPLVLQENVRRAVPTSWDPPALASFIENFGTHIITSVTIGGKDVVYIKQHQSSPLSTTEIKNYVKDIGNQRFSSTESHTSSGQLNYKDKASSGADPSLFNSQGIYPQPTTAPSLTGNGKEDVTVIFRRRGGDDLVQSHTQWEKTVQYSPDVIEMSFSPITLLLEGIIGKDHLTRAINLYLEHKPQIEELRYFLEFQVPRIWAPAQDRLPGHQRKEPVCPSLQFSIMGQKLYVSQEQISVGRKPVTGMRLNLEGSKQNRLSIHLQHLASLPKILQPYWDSNVAIGAPKWQGPEEQDSRWFEPVKWKNFSHVSTAPIESPETFIGNLSGSFIVTGAQLGVWDFGSRNVLYMKLLYSRLPGCTIRRSLWDHAPNDKSKRRVPVDSSNGGSSSGSGESMVGNKLAKYVDMKEMSKGPQDPPGHWLVTGGKLGVEKGKIVLRLKYSLLNY

SEQ ID NO: 756 - protein, 585 aa, Polystichum polyblepharum (LW12418)
MADEDASFRGAHGTAVNAVQALGRGFDVTCDIRLLYCKSTPGSRLVVINDDHTANLNVSDGLVIPNVSKDIKARLEKPFRPSEGAQDFDQMSELFNKKLGIGGKIPSGTFNAMFNFSGSWQVDSSITKSLSVDGVVIPLYSVHLRPPFILREEVKMAVPSTWDPPALASFIEKYGTHIIISVEVGGKDTIYVKQHLSSSLTKSEVDSHVKKLVETRFQGMESGVTQAKDKFQELALTNPQKNRSQLVHDDGSSSLTSKEDITVIYRRRGGDDLVQDHLEWKKTVNTNPDILSMAFFPIVVLLDAGSGREHLNRAIEAHLQYKPPLEELQYFLEFQVTRAWAPVANQVGLPRKEPVCPSLQFSLMGPKLFISTDQVSVGRKPVTGLRLCLEGSKLNRLAVHLQHLTVLPKILQPHWDAYVAIGAPKWHGPEEQDSRWFEPVLWKNFAHVSTAPVEFSETWFGDASGAYIVTGAQLGVWDFGLKSVLHLKLLYSKVPGCTIRRSVWDHTPIGQQLSKAKKGTSSATAAAAAAATVTQTTQKLSKFVDTTEMARGPQDLPGHWLVTGAKLCVEKSNIFLRVKYSLLNY

SEQ ID NO: 757 - protein, 581 aa, Asplenium antiquum (Crissie)
MADEDASSRGALVTAVNAVQALGRGFDVTCDIRLLYCKGTPGSRLVVVDDDHNTYLRVSDGVVIPNVSADIRARLEKPSRPTLGVQGFDEMSEEFNKKLFIGGNIPSGMFNAMFNFSGSWQVDCSMTKRLAFDGLVLPLYSVHLRSPFILCEEVKKAVPNIWDPAALASFIEKYGTHIIRSVEVGGKDITYVKQHSSSTLTKEDVESHLKKLVESRFQGSKSDEIRRKDKETTDSSSSLTGKEDITVIYRRRGGDDLVQDHVEWKKTVNSNPDILSMAFFPIVLLLDPGTGREHLNRAIEAHLKYKPPLEELHYFLEFHVTRAWAPLANPVGPPRKEPICPALQFSLMGPKLFINTSQVSVGRKPVTGLRLCLEGSKLNRLAVLVQHLTVLPKILQPHWDAYVAIGAPKWHGPEEQDSRWFEPVLWKNFAHVSTAPVEFSETWFGDASGAYIVTGAQLGVWDFGLKSVLHLKLLYSKVPGCTIRRSVWDHTPIGQQQSKAKGASSASPATGSAAPDAVGASVAAAAAAATQATQKLSKFVDTSEMARGPQDLPGHWLVTGAKLCVGKSKIFLRVKYSLLNY

SEQ ID NO: 758 - protein, 347 aa, Verbascum chaixii (Vill)
MEENAAALHTAINSVQALGRGFDVNYDTRLLYCKGVAGSRIVDIDEEHPRDLYLSDNLVVPNVSRDIKSSVEAGGRDGFGVCSYSEMVEYFNRKADLSGQTPLGSFNVAFSYTGSKHIDAASTKSLCMDGFFIPLAKIQLVKASMSLNENVRRAVPTSWDPPGLASFIENFGTHVITSVTIGGKDVIYVKQHLSSPLAMVEIKNYVQDIGNQRFSSPEGLTNSGLLRYKDKGSDPSLFNSQGIYPQPASAPYLSWSGKEDVTVIFRRRGGDDLEQSHIQWAKTVRSSPDVIEMSFFPITELLDGVRGKEHLARAISLYLEYKPQIEELRYFLEFQVPCLTLNCSCTT

SEQ ID NO: 759 - protein, 400 aa, Platycerium wandae
MANEDVSRGARATAINAVQAIGRGFDITCDIRLLYCKGTPGSRLVVIDDDHTADLQVADDLVIQNVSKDIKARIEKPSRAYQGILDFDQMSELFNKKLSIDGKVPSGMFNAMFNFSGSWQVDSSSTKSLATDGMHIPLYSVHLRPPFILCEEVKRAVPSTWDPPALASFIEKYGTHIIRSVEAGGKDIIYMKQHSSSILSKTEVETHLKKLVEARFQDLDLQSNDEELKLSNPQKHRSQLVHADGSSSLTGKEDITVIYRRRGGDDLVQDPREWKKTVKSNPDILTMSFFPIVLLLDPGPGREHLNRAMDAHLKYKPPLEELQYFLEFQVTRAWAPVANQVGLPRKEPVCPSLQFSLMGPKLYISTDQVSVGRKPGASSLSGRKQAKSACRLRRAPHRAS

SEQ ID NO: 760 - protein, 397 aa, Asplenium prolongatum x Asplenium antiquum (Kurata)
MADEDASLRGAFATAVNAVQALGRGFDVTCDIRLLYCKGTPGTRLVVIDDDHTTDLKVSDGVVIPNVSTDIRARLEKPYRPSLGVQGFHEMSEEFNKKLSIGGNIPSGMFNAMFNFSGSWQVDSSMTKRLAVDGLVLPLYSVHLRSPFILCEEVKKAVPNIWDPAALASFIEKYGTHIIRSVDVGGKDIIYVKQHPSSTLTKHEVESHLKKLVESRFQAMESDVNQRKDKENSESSSSLTGKEDITVIYRRRGGDDLVQDHVEWKKTVNFNPDILSMAFFPIVLLLDPGTGREHLNRAIEAHLKYKPPLEELHYFLEFHVTRAWAPLANPVGPPRKEPICPGLQFSLMGPKLFINTSQVSVGRKPVTGLRLCLEGSKLNRLAVHVQHLTVLPKILQP

SEQ ID NO: 761 - protein, 576 aa, Stenochiaena tenuifolia
MADKDASSRGARGTAVNAVQALGRGFDVTCDIRLLYCKGAPGSRLVIIDDDHTADLKLSDSLVIPKVSKDIKARLDKPYCPSPGAQDFDQMSELFNRKLGIGGRIPSGMFNAMFNFSGSWQVDASMTKSLAVDGVFIHLYSVHLKAPFILCEEVKKAVPSTWDPAALASFIEKYGTHVIIGVEVGGKDIIYVKQHQSSSLTKTEVDLHLKKLVEMRFQEKESKEPALPPQKNRSQFVHADGPSSLTGKEDITVIYRRRGGDDLIQDHLEWKKSVHSNPDILSMTFFPIVLLLDAGSGREHLNRAIEAYLRYKPPLEELHFFLEFQVPRAWAPVASQVVLPRKEPVCPTLQFSLMGPKLFINTDQVSVGRRPVTGLCLCLEGSKFNRLAVHVQHLTVLPKILQPHWDAYVAIGAPKWHGPEEQDSRWFEPVLWKNFAHVSTAPVEFSETWFGDASGAYIVTGAQLGVWDFGVKSVLHLKLLYSKVPGCTIRRSVWDHTPTGLQQSKAKTGMSSTSATSAAATTTAMQTTQKLSKFVDTTEMARGPEDLPGHWVVTGAKLCVEKSNIFLRVKYSLLNY

SEQ ID NO: 762 - protein, 585 aa, Davallia fejeensis
MASEDASLPGARATALNAVQALGRGFDVTCDIRLLYCKGTPGSRLVVVDDHTTDLKVANGLVIHNVSKDIKARLEKPSRAYQGVQDFDQMSELFNKKLFIEGKIPSGMFNAMFNFSGSWQVESLAIDGMHIPLYSVHLRSPFILCDEVKRAVPSTWDPPALASFIEKYGTHIIRSVEVGGKDIIYVKQHPSSNLTKSEVETHLKKLVETRFQGMESGLVHQKDEYQELTLMNQQKNRSQLVHADGSSSLTGKEDITVIYRRRGGDDLVQDPLEWKKTVNSNPDILTMAFFPIVLLLDPGPGREHLHRAIEAHLKYKPPLEELQYFLEFQVTRAWAPLSNQVGLPRKEPVCPSLQFSLMGPKLFISTDQVSVGRKPVTGLRLCLEGSKLNRLAVHVEHLTVLPKILQPHWDAYVAIGAPKWHGPEEQDSRWFEPVLWKNFAHVSTAPVEFSETWFGDASGAYIVTGAQLGVWDFGVKSVLHLKLLYSKVPRCTIRRSVWDHTPIGQQLSKAKKGASSTAAAAVAAAASIGAAATSQAMQKLSKFVDTTEMSRGPQDLPGHWLVTGAKLCVEKSNIFLRVKYSLLNY

SEQ ID NO: 763 - protein, 354 aa, Verbascum chaixii (Vill)
MALPSENALITTLGNSIQALGRGFDVTSDIRLLYCKGAPGSRLVHINEEQTRNLEISGSYAIPNVSVDIECSQGQSFNNKTPVWSFHEMAKYFNEKSGLPGNIPLGCFNAMFNFSGSRQLDAAATKSLAMVGYIIPLFTVKLAKPDLILHDQIKRAVPYSWDPASLASFIENYGTHIVTSATIGGRDVVYIRQHQSSPLSTSDIENYVKDIGDQRFSDSKGNSSAGSLKYKDKDVTVIFRRRGGDDLEQSYEKWAKSVEGAPDVISMTFTPIVSLLEGVPGIKHLARAIELYLEYKPPIEDLQYFLDFQISRAWAPEQNNNLQRKEPVCSSLQFSLMGAKLYISPDQVYINIIP

SEQ ID NO: 764 - protein, 351 aa, Platycerium bifurcatum
MANEDVSRGARATAINAVQAIGRGFDITCDIRLLYCKGTPGSRLVVIDDDHTADLQVADDLVIQNVSKDIKARIEKPSRAYQGILDFDQMSELFNKKLSIDGKVPSGMFNAMFNFSGSWQVDSSSTKSLATDGMHIPLYSVHLRPPFILCEEVKRAVPSTWDPPALASFIEKYGTHIIRSVEAGGKDIIYMKQHSSSILSKTEVETHLKKLVEARFQDLDLQSNDEELKLSNPQKHRSQLVHADGSSSLTGKEDITVIYRRRGGDDLVQDPREWKKTVKSNPDILTMSFFPIVLLSNCPKDGSSSLTGKEDITVIYRRRGGDDLVQDPREWKKTVKSNPDILTMSFFPIVL

SEQ ID NO: 765 - protein, 582 aa, Ophioglossum pendulum
MEEDDNDSALKASIVVNALQTLGRGFDLTCDIRIIYCKGTERSRLIEIDEEHTKTLEVPGGISIPNVSRDIKCVQGTEEHFSTGVLDFEQMAGYFNEVLSLSGKTASGVFNAVFNFSGSWNSDALATKSLAVDGWSIILYSLSLTRAPLTLIHEVKAAVPYTWDPAALASFIEKYGTHIVTSVSVGGKDAIYVKQHQSSTLTSTDVELHLKELRSIRFSPYGGHISFLGNEKVADQMLFSTQQILPQPCNSNGSSSFAGKEDITVIYRRRGGNDLVQGHDEWKKTVPTNPDVVTMTFVPITSLLENGPRSDHLSRAILVYLEYKPPIEELQYFLAFQVARVWAPVQNELGPPRREPVCPALQFSLMGPKLYISTEQVSVGRRPVTGLRLSLEGRNCNRLAVHVQHLTSLPKVLQPHWDAYIAIGAPKWHGPEEQDSRWFEPVLWRSFSHISTAPVEFSETWVGDASGAFIVTGAQLGVWDFGLKSVLYLRLLYSKVPGCTIRRSVWDHTPVPLSQHLKVKTSSKTSVSTATSETPKLLKFVDTTEMSRGPQDMPGHWMVTGAKLGVEKSKIFLRVKYSLLNY

SEQ ID NO: 766 - protein, 324 aa, Asplenium prolongatum x Asplenium antiquum (Kurata)
MADEDASLRGAFATAVNAVQALGRGFDVTCDIRLLYCKGTPGTRLVVIDDDHTTDLKLSDGLVIPNVSTDIRARLEKPSRPSLGVRGFDEMSEEFNKKLSIGGNIPSGMFNAMFNFSGSWQVDSSMTKRLAVDGLVLPLYSVHLRSPFILCEEVKKAVPNIWDPAALASFIEKYGTHIIRSVDVGGKDIIYVKQHPSSTLTKHEVESHLKKLVESRFQAMESDVNQRKDKENSESSSSLTGKEDITVIYRRRGGDDLVQDHVEWKKTVNFNPDILSMAFFPIVLLLDPGTGREHLNRAIEAHLKYKPPLEELHYFLEFHVTRAW

SEQ ID NO: 767 - protein, 550 aa, Symphoricarpos x chenaultii (Hancock)
MDDALTTTLFNSIQALGRGFDVTSDIRLLYCKGAPGSRLIHLDDQHVKDLVLNDGFVVPNVSVDVECSTGNRNPETISVCSFHEMAKYFNEKSDISGHVPLGSFNSMFNFTGSRQIDAAATKSLAMIGYVIPLYKVKLSISNLVLHEDVNRAVPYSWDPASLASFIENYGTHIVTSATVGGRDIVYIRQHQSSPLSAPDIDNYVKDIGDQRFSEVKGHQSAGPLKYKDKDVTVIFRRRGGDDLEQSHSKWSETVRRAPDVINMTFTPIASLLEGVPGIKHLARAIDLYLEYKPPIEDLQYFLEFQIARAWAPEQSNLQRKGPVCSSLQFSLMGPKLYISPDQVTVGRKPVTGLRLTLEGIKQNRLAINLQHLVSLPKILQPHWDAHMAIGAPKWQGPEEQDSRWFEPIKWKNFSHVSTAPIEHTETCIGDLSGVHIVTGAQFGVWDFGAKSVLHLKLLFSKVPGCTIRRSVWDHSPSNISTSQRPNGASTSDEKKVDGSSQAGKLAKIVDMTEMSKGPQDVPGHWLVTGAKLGVDKGKIVLRVKYSLLNY

SEQ ID NO: 768 - protein, 585 aa, Polystichum tripteron
MADEDASFRGARGTAVNAVQALGRGFDVTCDIRLLYCKSTPGSRLVVIDDDHTANLNVSDGLVIPNVSTDIRARLEKPFRPSPGVQDFDQMSELFNKKLGIGGKIPSGMFNAMFNFSGSWQADSSITKSLSVDGVIIPLYSVHLRSPFILREEVKMAVPSTWDPPALASFIEKYGTHIIISVEVGGKDAIYVKQHLSSSLTKSEVDSHLKKLVETRFQGMESGVTQAKDKFQDLALTNPQKNRSQLVHADGSSSLTGKEDITVIYRRRGGDDLVQDHLEWKKTVNTNPDILSMAFFPIVLLLDAGSGREHLNRAIEAHLQYKPPLEELHYFLEFQVPRAWAPVANQVGLPRKEPVCPLLQFSLMGPKLFISTDQVSVGRKPVTGLRLCLEGTKLNRLAVHLQHLTVLPKILQPHWDAYVAIGAPKWHGPEEQDSRWFEPVLWKNFAHVSTAPVEFSETWFGDASGAYIVTGAQLGVWDFGLKSVLHLKLLYSKVPGCTIRRSVWDHTPIGQQLSKAKKGTSSATAAAAAAATVTQTTQKLSKFVDTTEMARGPQDLPGHWLVTGAKLCVEKSNIFLRVKYSLLNY

SEQ ID NO: 769 - protein, 424 aa, Tupidanthus calyptratus
MEENAAALHTAMNSVQALGRGFDVNFDIRLLYCKGVAGSRIVEIDEEHTRDMCLYDGLVVPNVSKDVHNSQETIGRDGSGVCNYFEMVEYINKKANLSENVPVGCFNAAFNFTGCKHIDAAATKTLCLDGFFIPLAKVQLVKSQLVLQENVIRAVPASWDPPALASFIENFGTHVIVSVTIGGKDVIYVKQHQSSSLSKVEIKNYAQDIGNQRFSTTENHTYVKQHQSSPLSKVEIKNYAQDIGNQRFSTTENHTISGLLKYKDKGVDPSLYNSQGVHPQPSTATSLIGNGKEDVTVIFRRRGGDDLEQSHTQWARTVRSSPDVIEMSFFPIIPLLEGVTGKEHLAQAIDLYLEYKPQIEELRYFLEFQVPRIWAPIQDRPPGYQRKEPVCPIFAVQHDGAKALHQPRASFSWAQTRDRYAFMS

SEQ ID NO: 770 - protein, 354 aa, Blechnum gibbum
MAEENASSRGARVTAVNAVQALGRGFDVTCDIRLLYCKGTPGSRLVVIDDDHTADLKLSDSLVIPNVSTDIKARLDKPSFPSPGVQDFDQMSELFNKKLAIGGKIPSGMFNAMFNFSGSWQVDSSMTKSLAFDGVVIPLYSVHLRAPFILCEEVKKAVPTTWDPAALASFIEKYGTHVIISVDVGGKDIIYVKQHQSSPLTKSEVDLHLKKLVETRFQGMESGVIQAKDKFQELALNPQKNRSQLVHADGSSSLTGKEDITVIYRRRGGDDLVQDHLEWKKTVHSNPDILSMAFFPIVLLLDAGSGREHLIRAIEAHLKYKPPLEELHYFLEFQVPRAWAPAFYCWMLAQVESI

SEQ ID NO: 771 - protein, 608 aa, Tupidanthus calyptratus
MGENAAALHTAMNSVQVGDLMSILTSGCCIAREWQGQGLWKLMKSIPGICACMTVLLCPMFQKMCTTLRRRLAVMVLAFAIILRWWSTLICNYFEMVEYINKKANLSENVPVGCFNAAFNFTGCKHIDAAATKTLCLDGFFIPLAKVQLVKSQLVLQENVIRAVPASWDPPALASFIENFGTHVIVSVTIGGKDVIYVKQHQSSSLSKVEIKNYAQDIGNQRFSTTENHTTSGLLKYKDKGVDHTTSGLLKYKDKGVDPSLYNSQGVHPQPSTATSLIGNGKEDVTVIFRRRGGDDLEQSHTQWARTVRSSPDVIEMSFFPIIPLLEGVTGKEHLAQAIDLYLEYKPQIEELRYFLEFQVPRIWAPIQDRPPGYQRKEPVCPSLQFSMMGQKLYISQEQVSVGRKPVTGMRLCLEGSKQNRLIIHLQHLACLPKILQPYWDTHVSIGAPKWQGPEEQDSRWFEPVKWKNFSHVSTAPIECPETFVGDQSGVYIVTGAQLGVWDFGSRNVLYMKLLFSRLPGCTIRRSLWDHKPNEESKKSAATGNNSGDSSSASGETLAGNKIAKSVDMSAMSKGPQDAPGHWLVTGGKLGVEKGKIVLRVKYSLLNY

SEQ ID NO: 772 - protein, 581 aa, Marsilea mutica
MAENDKFKLARTTAVNAVQALGRGFDVTCDIRLLYCKGSPGSRLLKVDEETLEDLVLADDVRVPRVSSDIKKKPEIPSRYSLGVLDFDQMSELFNKKLGISGKTPLGMFNAMFSFSGCVQADKSQTKSLAVDGWNIPLYSVYLKPPFILSEEVKKAVPSTWEPAALASFIEKYGTHIILSVEVGGKDVIYVKQHESSNLTKAEMELHLNKLFESRFKGIESSMFTSENKHKEQLMFTNPKVRSQPFSTDVTSSLTGKEDITVIYRRRGGNDLVQDHMQWKDTVNESPDVLSMTLLPTSSLLDPGPGYENLSRAIDAYLNFKPPLEELQYFLEFQVPRAWAPVVNPVGPRKEPVCPALQFSLMGPKILICTDQVSVGRKPVTGLRLCLEGAKVNRLAVHVQHLTTLPKILQPHWDSYIPIGAPKWHGPEEQDSRWFEPVLWKNFSHVSTAPIEYNETWFGDASGAFIVTGAQLGVWDFGLKSVLHLKLLYSKVPGCTIRRSVWDHTPGPSEQQQSKAKKVVSNSNPITVATQATQKLMKFVDTSEVMRGPEHLPGHWLVTGAKLCVEKSKIFLRVKYSLLNY

SEQ ID NO: 773 - protein, 587 aa, Platycerium wandae
MANEDVSRGARATAINAVQALGRGFDVTCDIRILYCKGTLGSRLLIIDDDHTADFQVADDLVIPNVSKDIKARIEKPSRAYQGVLDFDQMSELFNKKLSIEGKVPSGMFNAMFNFSGSRQVDSSSTKSLAIDGVHIPLFSVHLRPPFILCEEVKRAVPSTWDPPALASFIEKYGTHIIRSVEVGGKDIIYMKQHSSSNLSKTEVETHLKKLVEARFQDLDLQSNDEELKFLNPQKNRSQLVYADGSSSLTGKEDITVIYRRRGGDDLVQDPWEWKKTVKSNPDILTMSFLPIVLLLDPGPGRDHLNRAIDAHLKYKPPLEELQYFLEFQVTRAWAPVANQVVLPRKEPVCPSLQFSLMGPKLYINTDQVSVGRKPVTGLRLCLEGSKLNRLAVHVEHLTVLPKILQPHWDAYVAIGAPKWHGPEEQDSRWFEPVLWKNFAHVSTAPVEFSETWFGDASGAYIVTGAQLGVWDFGVKSVLHLKLLYSKVPGCTIRRSVWDHTPIGQQASKAKKGASSAAAAGVAAAAAAVGAAASSTQTMQKLSKLIDMTEMSRGPQDLPGHWLVTGAKLCVEKGNIFLRVKYSLLNY

SEQ ID NO: 774 - protein, 456 aa, Asplenium antiquum (Crissie)
MTKRLAFDGLVLPLYSVHLRSPFILCEEVKKAVPNIWDPAALASFIEKYGTHIIRSVEVGGKDITYVKQHSSSTLTKEDVESHLKKLVESRFQGSKSDEIRRKDKETTDSSSSLTGKEDITVIYRRRGGDDLVQDHVEWKKTVNSNPDILSMAFFPIVLLLDPGTGREHLNRAIEAHLKYKPPLEELHYFLEFHVTRAWAPLANPVGPPRKEPICPALQFSLMGPKLFINTSQVSVGRKPVTGLRLCLEGSKLNRLAVLVQHLTVLPKILQPHWDAYVAIGAPKWHGPEEQDSRWFEPVLWKNFAHVSTAPVEFSETWFGDASGAYIVTGAQLGVWDFGLKSVLHLKLLYSKVPGCTIRRSVWDHTPIGQQQSKAKGASSASPATGSAAPDAVGASVAAAAAAATQATQKLSKFVDTSEMARGPQDLPGHWLVTGAKLCVGKSKIFLRVKYSLLNY

SEQ ID NO: 775 - protein, 382 aa, Verbascum chaixii (Vill)
MEENAAALHTAINSVQALGRGFDVNYDTRLLYCKGVAGSRIVDIDEEHPRDLYLSDNLVVPNVSRDIKSSVEAGGRDGFGVCSYSEMVEYFNRKADLSGQTPLGSFNVAFSYTGSKHIDAASTKSLCMDGFFIPLAKIQLVKSSMALKENVRRAVPTSWDPPGLASFIENFGTHVITSVTIGGKDVIYAKQHHSSPLSMVEIKNYVQDIGNQRFSSVEVVTNSGVLKYKDKGSDPSLFNSQGIYPQPASAPYLSWSGKEDVTVIFRRRGGDDLEQSHIQWAKTVRSSPDVIEMSFFPITELLDGVRGKEHLARAISLYLEYKPQIEELRYFLEFQVPRIWAPVSDRFPGQPRKEPVCPSLRVTIQHDGTKAICQPRASFSWA

SEQ ID NO: 776 - protein, 589 aa, Pellaea rotundifolia
MADEDASLRGAHATALNAIQAVGRGFDVTCDIRLLYCKGTPGSRLVVVDDEHTTDLKLLDGLDIPKVSTDIRARQEKPSRASLGVQDFDQMSELFNKKLNIRGKIPSGLFNSMFSFSGSWQVDASMTKSLALDGVLLPLYSVHLRSPFILCEEVKKAVPSTWDPAALASFIEKYGTHVILSVEVGGKDIVYVKQHQSSSLTKSEVELQLRKLVETRFQGMEMGIADVNNKLQELPPLSSQKNHSKIVHADGSSSLTGKEDITVIYRRRGGDDLIQDHLEWKKTVYTNPDVLSMSLFPIVFLLDPGPGRENLNRAIEAYTIYKPPLEELQYFLEFQVSRAWAPVANQLGLPRKEPVCPSLQFSLMGPKLFISTDQISVGRKPVTGLRLCLEGSKQNRLAVHLQHLTVLPKILQPHWDAYVAIGAPKWHGPEEQDSRWFEPVLWKNFAHVSTAPVEFNETWFGDASGAYIVTGAQLGVWDFGMKSVLHLKLLYSKVPGCTIRRSVWDHTPSGLHQSKGKKGTSSASSSPAAAGSGAPSTTQATQKLSKFVDTTELARGPQDLPGHWLVTGAKLCVEKSNVFLRVKYSLLNY

SEQ ID NO: 777 - protein, 330 aa, Symphoricarpos x chenaultii (Hancock)
MEENAAALHTAINSVGALGRGFDVNFDTRLLYCKGVAGSRVVEIDEEHSWDLRLYDSLVVPNVPREIKNSHETSGRDGFGVCSYHEMAEYFNKKANLSGHVPLGSFNAAFSFTGSKHIDAAATKTLCMDGYFIPLAKVQLNKSPLVLQENVRRAVPTSWDPPALASFIENFGTHIITSVTIGGKDVVYIKQHQSSPLSTTEIKNYVKDIGNQRFSSTESHTSSGQLNYKDKGADPSLFNSQGIYPQPTTAPSLTGNGKEDVTVIFRRRGGDDLVQSHTQWEKTVQYSPDVIEMSFSPITLLLEGIIGKDHLTRAINLYLERKTSQLLVSD

SEQ ID NO: 778 - protein, 513 aa, Hedera helix (Galaxy)
MDEEHTRDLCLYDGLVVPNVSKDVQNSQETIGRDGSGVCNYFEMMEYVNKKANLSENVPLGCFNAAFNFTSCKNIDAAATKTLCLDGFFIPLAKVQLVKSQLALQENVIRAVPASWDPPALASFIENFGTHVIVSVTIGGKDVIYVKQHQSSSLSKVEIKNYVQDIGNQRFSTTENHTTSGLLKYKDKDVTVIFRRRGGDDLEQSHPQWARTVRSSPDVIEMSFFPIIPLLEGVTGKEHLAQAIDLYLEYKPQIEELRYFLEFQVPRIWAPTQDRPLGYQRKEPVCPSLQFSMMGQKLYISQEQVSVGRKPVTGICLCLEGSKQNRLSIHLQHLACLPKILQPYWDTHVAIGAPKWQGPEEQDSRWFEPVKWKNFSHVSTAPIESPETFIGDQSGVYIVTGAQLGVWDFGSRNVLYMKLLFSRLPGCTIRRSLWDHKPNDKLKKLAATGNNCGDSSSGSGETLAGNKLAKFVDMSAMSKGPQDAPGHWLVAGGKLGVQKGKIVLRVKYSLLNY

SEQ ID NO: 779 - protein, 581 aa, Ophioglossum pendulum
MEDDDSALKVSIAVNALQTLGRGFDLTCDIRIIYCKGTEGSRLLEIDEEHTKNLELPGGISIPDVSRDIKCVQGTEKHFSTGVLHFEQMAGYFNEVLSLSGKTASGVFNAVFNFSGSWNSDALATKSLAVDGWSIILYTLSLTRVPLTLIHEVKVAAPYTWDPAVLASFIERYGTHIVTSVSIGGKDVIYVKQHQSSTLTPTDVELHLKELRSVRFSPFGGHISFMMNEKVADQMLFSTQQIRPQPYNSDCSSSFTGKEDITVIYRRRGGNDLVKGHDEWKKTVPTNPDVVTMTFIPITSLLEDGPCKDHLNRAILVYLEYKPPIEELQYFLAFQVARVWAPVQNELGPPRREPVCPALQFSLMGPKLYISTEQVSVGRRPVTGLRLSLEGRNCNRLAVHVQHLTSLPKVLQPHWDAYIAIGAPKWHGPEEQDSRWFEPVLWRNFSHISTAPVEFNETWIGDASGAFVVTGAQLGVWDFGLKSVLYLRLLYSKVPGCTIRRSVWDHTPVSLNQNLKMDSSKVLNTVPTATSQTPKLLKFVDTTEMSRGAQDMPGHWLVTGAKLGVDKSKIFLRVRYSLLNY

SEQ ID NO: 780 - protein, 585 aa, Blechnum brasiliense
MAEENASSRGARVTAVNAVQALGRGFDVTCDIRLLYCKGTPGSRLVVIDDDHTADLKLSDSLVIPNVSTDIKARLDKPSCPSLGVQDFDQMSELFNKKLAIGGKIPSGMFNAMFNFSGSWQVDSSMTKSLAFDGVVIPLYSVHLRAPFILCEEVKKAVPSTWDPAALASFIEKYGTHVIISVDVGGKDIIYVKQHQSSPLTKSEVDLHLKKLVETRFQGMESGVIQAKDKFQELALNPQKNRSQLVHADGSSSLTGKEDITVIYRRRGGDDLVQDHLEWKKTVHSNPDILSMAFFPIVLLLDAGSGREHLIRAIEAHLKYKPPLEELHYFLEFQVPRAWAPAANQVGLPRKEPVCPTLQFSLMGPKLFISTDQVSVGRKPVTGLRLCLEGSKLNRLAVHVQHLTVLPKILQPHWDAYVAIGAPKWHGPEEQDSRWFEPVLWKNFAHVSTAPVEFSETWFGDASGAYIVTGAQLGVWDFGLKSVLHLKLLYSKVPGCTIRRSVWDHMPTLLQQSKAKRGTSSASPAATAAAAAATQTTQKLSKFVDTTEMARGPQDLPGHWLVTGAKLCVEKSNIFLRVKYSLLNY

SEQ ID NO: 781 - protein, 580 aa, Ophioglossum pendulum
MEDDDSALKVSIAVNALQTLGRGFDLTCDIRIIYCKGTEGSRLLEIDEEHTKNLELPGGISIPDVSRDIKCVQGTEKHFSTGVLHFEQMAGYFNEVLSLSGKTASGVFNAVFNFSGSWNSDALATKSLAVDGWSIILYSLSLTRAPLTLIHEVKAAVPYTWDPAALASFIEKYGTHIVTSVSVGGKDAIYVKQHQSSTLTSTDVELHLKELRSIRFSPYGGHISFLGNEKVADQMLFSTQQILPQPCNSNGSSSFAGKEDITVIYRRRGGNDLVQGHDEWKKTVPTNPDVVTMTFVPITSLLENGPRSDHLSRAILVYLEYKPPIEELQYFLAFQVARVWAPVQNELGPPRREPVCPALQFSLMGPKLYISTEQVSVGRRPVTGLRLSLEGRNCNRLAVHVQHLTSLPKVLQPHWDAYIAIGAPKWHGPEEQDSRWFEPVLWRNFSHISTAPVEFNETWIGDASGAFVVTGAQLGVWDFGLKSVLYLRLLYSKVPGCTIRRSVWDHTPVPLSQHLKVKTSSKTSVSTATSETPKLLKFVDTTEMSRGPQDMPGHWMVTGAKLGVEKSKIFLRVKYSLLNY

SEQ ID NO: 782 - protein, 387 aa, Asplenium prolongatum x Asplenium antiquum (Kurata)
MESDVNQRKDKENSESSSSLTGKEDITVIYRRRGGDDLVQDHVEWKKTVNFNPDILSMAFFPIVLLLDPGTGREHLNRAIEAHLKYKPPLEELHYFLEFHVTRAWAPLANPVGPPRKEPICPGLQFSLMGPKLFINTSQVSVGRKPVTGLRLCLEGSKLNRLAVHVQHLTVLPKILQPHWDAYVAIGAPKWHGPEEQDSRWFEPVLWKNFAHVSTAPVEFSETWFGDASGAYIVTGAQLGVWDFGLKSVLHLKLLYSKVPGCTIRRSVWDHNPTGQQQSKATKGTSSASPAMGAAALVAATQVTQKLSVCGYVRDGQRPTRPAWPLASHWRKAVRGEEQNLSESEVLSSELLEENWPWRDNSLSLCILKRVCAICRPSRKKKSSASE

SEQ ID NO: 783 - protein, 587 aa, Pellaea rotundifolia
MADEDASLRGAHATALNAIQAVGRGFDVTCDIRLLYCKGTPGSRLVVVDDEHTTDLKLLDGLDIPKVSTDIRARQEKPSRASLGVQDFDQMSELFNKKLNIRGKIPSGLFNSMFSFSGSWQVDASMTKSLALDGVLLPLYSVHLRSPFILCEEVKKAVPSTWDPAALASFIEKYGTHVILSVEVGGKDIVYVKQHQSSSLTKSEVELQLRKLVETRFQGMEMGIADNKLQELPPLSSQKNHSKIVHADGSSSLTGKEDITVIYRRRGGDDLIQDHLEWKKTVYTNPDVLSMSLFPIVFLLDPGPGRENLNRAIEAYTIYKPPLEELQYFLEFQVSRAWAPVANQLGLPRKEPVCPSLQFSLMGPKLFISTDQISVGRKPVTGLRLCLEGSKQNRLAVHLQHLTVLPKILQPHWDAYVAIGAPKWHGPEEQDSRWFEPVLWKNFAHVSTAPVEFNETWFGDASGAYIVTGAQLGVWDFGMKSVLHLKLLYSKVPGCTIRRSVWDHTPSGLHQSKGKKGTSSASSSPAAAGSGAPSTTQATQKLSKFVDTTELARGPQDLPGHWLVTGAKLCVEKSNVFLRVKYSLLNY

SEQ ID NO: 784 - protein, 298 aa, Tupidanthus calyptratus
MEPRKNMSSDALNTTLWNSIQALGRGFDVTSDIRLLYCKGIPGSRLVQINDGVTKDLAVSDGFVVPNVSVDIESSRGEEVTETTAVCSFHEMAIYFNEKSEISGHVPLGSFNAMFNLTGSWQLDAATTKSLAMIGSVIPLYKVELANLDLVLNEEVKRAVPYSWDPASLASFIENYGTHIVTSATVGGRDVVYIRQHQSSPLSVSDIENYVKDIADQRYSGSRSNPSAAPLKYKDKDVTVIFRRRGGDDLEQSHVRWAETVQTSPDVINMTFIPIVSLLEGVPGIKHLACAIELYLEL

SEQ ID NO: 785 - protein, 545 aa, Asplenium nidus var plicatum
MTDEDASSRGAFVTAVNAVQALGRGFDVTCDIRLLYCKGTPGSRLVVIDDDHNTDLRVSDGVVIPNVSPDIRARLEKPYRPSLGVQDFHKMSEEFNKKLFIGGDIPSGMFNAMFNFSGSWQVDSSMTKSLAIDGLVLPLYSVHLRSPFILCEEVKNAVPNTWDPAALASFIEKYGTHIIRSVEIGGKDIIYVKQHPSSTLTKHEVESHLKKLVESRFQAMESDVIRRKDKENSESSSSLTGKEDITVIYRRRGGDDLVQDHVEWKKTVNSNPDILSMAFFPIVLLLDAGSGREHLNRAIEAHLKYKPPLEELHYFLEFHVARAWAPLANPVGPPRKEPICPALQFSLMGPKLFINTSQVSVGRKPVTGLRLSLEGSKLNRLAVHVQHLAVLPKILQPHWDAYVAIGAPKWHGPEEQDSRWFEPVLWKNFAHVSTAPVEFSETWFGDASGAYIVTGAQLGVWDFGLKSVLHLKLLYSKVPGCTIRRSVWDHTPTGQQQSKGTKGTSSASPAAGTAAALVALLLLLLVACCCCCCCDTGHPETLQVC

SEQ ID NO: 786 - protein, 565 aa, Prostanthera rotundifolia
MASPPTKNFSSLTVSENALTTTLCNSIQALGRGFDVTSDIRLLYCKGAPGSRLVHIDEEQNRNLEISESCVIPNVSVDIECCGGQSSNEKTPVWSFHEMAKYFNGKSGLPGQVPLGGFNAMFNFSGSWQLDAAATKSLAMVGYIIPLFSVKLVKADLILRDEIKRAVPYSWDPASLASFIENYGTHIVTSATIGGRDVVYVRQHQSSPLSASDIENYVKDIGDQRFSDSKVNTNAGSLKYKDKDVTVIFRRRGGDDLEQSYTKWATTVERAPDVINMTFTPIISLLEGVAGIKHLARAIELYLEYKPPIEDLQYFLDFQISRVWAPEQNNLQRKEPVCPSLQFSLMGSKLYISPDQVTVGRKPVTGLKLSLEGIKQNRLTINLQHLVSLPKILQPHWDAHIAIGAPKWQGPEEQDSRWFEPIKWKNFSHVSTAPIEFTDTCIGDLSGVHIVTGAQLGVWDFGAKSVLHLKLLFSKVPGCTIRRSVWDHSPSNLSAPQKPDGSSSSSLSEKGDGSSQTGKLAKIVDMTEMSKGPQDMPGHWLVTGAKLGVDKGRIVLRVKYSLLNY

SEQ ID NO: 787 - protein, 581 aa, Davallia fejeensis
MASEDASLPGARATALNAVQALGRGFDVTCDIRLLYCKGTPGSRLVVVDDHTTDLKVANGLVIHNVSKDIKARLEKPSRAYQGVQDFDQMSELFNKKLFIEGKIPSGMFNAMFNFSGSWQVVDGMHIPLYSVHLRSPFILCDEVKRAVPSTWDPPALASFIEKYGTHIIRSVEVGGKDIIYVKQHPSSNLTKSEVETHLKKLVETRFQGMESGLVHQKDEYQELTLMNQQKNRSQLVHADGSSSLTGKEDITVIYRRRGGDDLVQDPLEWKKTVNSNPDILTMAFFPIVLLLDPGPGREHLHRAIEAHLKYKPPLEELQYFLEFQVTRAWAPLSNQVGLPRKEPVCPSLQFSLMGPKLFISTDQVSVGRKPVTGLRLCLEGSKLNRLAVHVEHLTVLPKILQPHWDAYVAIGAPKWHGPEEQDSRWFEPVLWKNFAHVSTAPVEFSETWFGDASGAYIVTGAQLGVWDFGVKSVLHLKLLYSKVPRCTIRRSVWDHTPIGQQLSKAKKGASSTAAAAVAAAASIGAAATSQAMQKLSKFVDTTEMSRGPQDLPGHWLVTGAKLCVEKSNIFLRVKYSLLNY

SEQ ID NO: 788 - protein, 548 aa, Verbascum chaixii (Vill)
MASMGSENALITTLCNSIQALGRGFDVTSDIRLLYCKGAPGSRLVHINEEQTRNLEISGSYAIPNVSVDIECSQGQSFNNKTPVWSFHEMAKYFNEKSGLPGNIPLGCFNAMFNFSGSRQLDAAATKSLAMVGYVIPLYMVKLAKPNLILRDEIKRAVPYSWDPASLASFIENYGTHIVTSATIGGRDVVYIRQHQSSPLSASDIENYVKDIGDQRFSDSKGNSSAGALKYKDKDVTVIFRRRGGDDLEQSYAKWAKTVEGAPDVITMTFTPIVSLLEGVAGIKHLARAIELYLEYKPPIEDLQYFLDFQISRAWAPEQNNNLQRKEPVCSSLQFSLMGPKLYISPDQVTVGRKPVTGLKLSLEGLKQNRLAINLQHLVSLPKILQPHWGPHMAIGAPRWQGPEEQDSRWFEPIKWKNFSHVSTSPIEYTDTCIGDLSGVHIVTGAQLGVWDFGARSVLHLKLLFSKVPGCTIRRSVWDHSPSNLQNPEGSSSSNESSQVGKLAKIVDMSEMSKGPQDMPGHWLVTGAKLGVDKGRIVLRVKYSLLNY

SEQ ID NO: 789 - protein, 591 aa, Nephrolepis falcata
MADEDASFRGARATAVNAVQALGRGFDVTCDIRLLYCKGTPGSRLVVIDDDNTTDLKVADGLSIPNISTDIRARLERPSRASQGVQDFDQMSELFNKKLCIGGTIPSGMFNAMFNFSGSQQVDSSITKSLAVDGVLIPLYSVHLRPPFILSEEVKRAVPSTWDPPALASFIEKYGTHIIMSVEVGGKDIIYVKQHPSSSLTKPEVDAHLKKLVETRFLGMESGVNQAKEKDLALLNPQKNRSHLVNADGSSSLTGKEDITVIYRRRGGDDLIQDHSEWKKTVNSNPDILSMAFFPIVLLLDAGPGREHLSRAIEAHLNYKPPLEELQYFLEFQVTRAWAPVANQVGLLRKEPVCPSLQFSLMGPKLFINTDQVSVGRKPVTGLRLCLEGSKLNRLAVHVQHLTVLPKILQPHWDAYVAIGAPKWHGPEEQDSRWFEPVLWKNFAHVSTAPVEFSETWFGDASGAYIVTGAQLGVWDFGLKSVLHLKLLYSKVPGCTIRRSVWDHTPVGQQLNKAKKGASGATAAAAATTAAAAAAAAVTTQTTQKLSKFVDTTEMSRGPQDLPGHWLVTGAKLCVEKSNIFLRVKYSLLNY

SEQ ID NO: 790 - protein, 578 aa, Equisetum arvense
MAEDEPSRTLGTNVIQALGQGFDITSDIRLSYCKGSRLVQIDAEQTSDLVLPGVTASIPQVPTEIQCLPGRTMRHGTGVLDFEKMAQRFNKALSVNGKIPSGLFNAMFSFSGSWRADAHVTKSLALDGWFIMLYNLKLAHSSFKLRGEIKREVPSTWDPSALSSFIERHGTHIVTSVTVGGKDAIYVKQHQSSSLTSMEIESYLKELGDRRFLARSKHSAFEMKEKGAGQSFPPPAQSLLPTSASDSSSSLTGKEDVTVIYRRRGGDDLEQNHEEWKYTIFSNPDVISMTFIPIASLLEGCPGKEHLIRAIDVYLEYKPPIEELQYFLEFQVTKVWAPVQNDGRLPRKEPICPSLQFSLMGPKLFINTEQVSVGRRPVTGLRLSLEGTKANRLCIHIQHLVALPKILRPHWDSYVAIGALKWHGPEEQDSRWFEPIQWKNFSHVSTAPIEFNEAWMVDLSGAHVVTGAQLGVWDFGPKSVLYLRLLYSKVPGCTIRRSVWDHNPVSYHHSDASKDIINNSPVSSSGALQVNKLVKFVDTEEMTRGPHDMPGHWLVTGAKLGVEKSRIFLRAKYSLLNY

SEQ ID NO: 791 - protein, 570 aa, Asplenium australasicum
MADEDSSLRGAFATAVNAVQALGRGFDVTCDIRLLYCKGALGSRLVVIDDDHTADLKLSDGLVIPNVSMDIRARLEKPSCPSLGVQGFDEMSEEFNKKLFIGGDIPSGMFNAMFNFSGSWQVDSSMTKSLAIDGLVLPLYSVHLRSPFILCEEVKNAVPNTWDPAALASFIEKYGTHIIRSVEIGGKDIIYVKQHPSSTLTKHEVESHLKKLVESRFQATESDVIWRKDKENSESSSSLTGKEDITVIYRRRGGDDLVQDHVEWKKTVNSNPDILSMAFFPIVLLLDPGTGREHLNRAIEAHLKYKPPLEELHYLLEFHVTRAWAPLANPAGPSRKEPVCPALQFSLMGPKLFINMSQVSVGRKPVTGLRLCLEGSKLNRLAVHVQHLTVLPKILQPHWDAYVAIGAPKWHGPEEQDSRWFEPVLWKNFAHVSTAPVEFSETWFGDASGAYIVTGAQLGVWDFGLKSVLHLKLLYSKVPGCTIRRSVWDHAPIGGQQQSKAKGASSASPAALDAAAAATQATQKLSKFVDTSEMARGPQDLPGHWLVTGAKLCVGKSNIFLRVKYSLLNY

SEQ ID NO: 792 - protein, 560 aa, Tupidanthus calyptratus
MEPRKNMSSDALNTTLWNSIQALGRGFDVTSDIRLLYCKGIPGSRLVQINDGVTKDLAVSDGFVVPNVSVDIESSRGEEVTETTAVCSFHEMAIYFNEKSEISGDVPLGSFNAMFNLTGSWQLDAATTKSLAMIGSVIPLYKVELANLDLVLNEEVKRAVPYSWDPASLASFIENYGTHIVTSATVGGRDVVYIRQHQSSPLSVSDIENYVKDIADQRYSESRSHPSAAPLKYKDKDVTVIFRRRGGDDLEQSHIRWAETVQTSPDVINMTFIPIVSLLEGVPGIKHLACAIELYLEYKPPIEDLQYFLEFQIARVWAPEQSNIQRKDPVCPSLHFSLMGPKLYISPDQVTVGRKPVTGLRLTLEGTKQNRLAIHLQHLVSLPKILQPHWDAHMAIGAPKWQGPEEQDSRWFEPIKWKNFSHVSTAPIEHTETCIGDLSGVYIVTGAQFGVWDFGASKSVLHLKLLFSKVPGCTIRRTVWDHSPSNVSGVQRSNGASTSLLHERTTDSSGHIGKLAKIVDMTEMSKGPQDIPGHWLVTGAKLGVDKGKIVLRIKYSLLNY

SEQ ID NO: 793 - protein, 560 aa, Tupidanthus calyptratus
MEPRKNMSSDALNTTLWNSIQALGRGFDVTSDIRLLYCKGIPGSRLVQINDRDAKDLRVSDEFVVPNVSVDIECSKGEKITETTPVCSFHEMAIYFNEKSEISGDVPLGSFNAMFNLTGSWQLDAATTKSLAMIGSVIPLYKVELANLDLVLNEEVKRAVPYSWDPASLASFIENYGTHIVTSATVGGRDVVYIRQHQSSPLSVSDIENYVKDIADQRYSESRSHPSAAPLKYKDKDVTVIFRRRGGDDLEQSHIRWAETVQTSPDVINMTFIPIVSLLEGVPGIKHLACAIELYLEYKPPIEDLQYFLEFQIARVWAPEQSNIQRKDPVCPSLHFSLMGPKLYISPDQVTVGRKPVTGLRLTLEGTKQNRLAIHLQHLVSLPKILQPHWDAHMAIGAPKWQGPEEQDSRWFEPIKWKNFSHVSTAPIEHTETCIGDLSGVYIVTGAQFGVWDFGASKSVLHLKLLFSKVPGCTIRRTVWDHSPSNVSGVQRSNGASTSLLHERTTDSSGHIGKLAKIVDMTEMSKGPQDIPGHWLVTGAKLGVDKGKIVLRIKYSLLNY

SEQ ID NO: 794 - protein, 358 aa, Waldsteinia ternata
MATRSSSSEALRTTLSNTIQALGRGFDVTSDIRLLYCKGAPGSRLVNLNETEAKDLAVSDGVVVPNVPADIQCSSGSRNTERVSVCSFHEMAEYFNKKSGISSRIPLGSFNAMFNFTGSWKVDASATKSLALVGYCIPLYKVDLGAENLVLHDEIKRAVPYTWDPAALASFIENYGTHIVTSATIGGRDVVYIRQHHSSPLSTSDIQSYVKDIGDDRFGDTKGQSSAGPLKYKDKDVTVIFRRRGGDDLEQSHSRWAETVQLAPDVINMTFTPIVSLLEGVPGIKHLSRAIELYLEYKPPIEDLQYFLDFQIAQAWAPEQNNLQRKGPVCSSLQFSLMGPKLYISPDQVSFLILAVPN

SEQ ID NO: 795 - protein, 310 aa, Platycerium hillii
MANEDVSRGARATAINAVQAIGRGFDITCDIRLLYCKGTPGSRLVVIDDDHTADLQVADDLVIQNVSKDIKARIEKPSRAYQGILDFDQMSELFNKKLSIDGKVPSGMFNAMFNFSGSWQVDSSSTKSLATDGMHIPLYSVHLRPPFILCEEVKRAVPSTWDPPALASFIEKYGTHIIRSVEAGGKDIIYMKQHSSSILSKTEVETHLKKLVEARFQDLDLQSNDEELKLSNPQKHRSQLVHADGSSSLTGKEDITVIYRRRGGDDLVQDPREWKKTVKSNPDILTMSFFPIVLLLDPGPGREHLNRAMD

SEQ ID NO: 796 - protein, 588 aa, Elaphoglossum
MAGEDASIRGARGTAVNAVQALGRGFDVTCDIRLLYCKGAPGSRLLVIDDEHTSDLKVLDGLVIPNVSTEIKARPEKPSRPSVGVQDFDQMSELFNKKLLIGGKIPSGLFNAMFNFSGAWQFDSSITKSLALDGVLIPLYSVHLRSPFILLDEVKMAVPSTWDPPALASFIEKYGTHIIISVEVGGKDIIYLKQHPSSSLTNSEVHSHLKKLVETRFQGMEGGANQAQDMFEALAVSNPPKNRSQLVHADGSSLTGKEDITVIYRRRGGDDLVQDHLEWKRTINSNPDILSMSFLPIVLLLDAGSGREHLNRAIEAHLKYKPPLEELQYFLEFQVTRAWAPVANQVGLPRKEPVCPLLQFSLMGPKLYISTDQVSVGRKPVTGLRLCLEGSKLNRLAVHLQHLTVLPKILQPHWDAYVAIGAPKWHGPEEQDSRWFEPVLWKNFAHVSTAPVEFSETWFGDASGAYIVTGAQLGVWDFGLKSVLHLKLLYSKIPGCTIRRSVWDHTPLGQQVGKAKKGTSSAGTAAAATATTAATAAQSTQKLSKFVDTTEMARGPQDLPGHWLVTGAKLCVEKSNIFLRVKYSLLNY

SEQ ID NO: 797 - protein, 573 aa, Sphaeropteris cooperi
MAEDDTSFRGARATALNALQALGRGFDVTCDIRLLYCKGAPAGARLVKIDEENCWDLALSDGLRIPNVSVGIKARQEECKRLSLGVSDFDQMSELFNRKLGIMGKTPLGMFNAMFSFSGSSQIDASMTKSLAVDGWVIPLYSVHLRAPFMLCEEVRKAVPTTWDPSALASFIEKYGTHIIIGVEVGGKDVIYVKQHQSSILTKSEIELHLKRLVETRFQGVENSVFKAEDKLQELAMFTTQKIRSQPLHADGSSSLTGKEDITVIYRRRGGDDLVQDHIEWKKTVYTNPDVLSMSFSSIVLLLEPGSGRDNLNRAIEAYLTYKPPLEELHYFLEFQVPRAWAPVVNQVGPPRKEPVCPPLQFSLMGPKLFISTDQISVGRKPVTGLRLCLEGSKLNRLAIHLQHLTVLPKILQPHWDYGPEEQDSRWFEPVLWKNFAHVSTAPVEFSETWFGDATGAYIVTGAQLGVWDFGPKSVLYMKLLYSKVPGCTIRRSVWDHTPAPSGQQQLKAQKGAPSTGPSSARQSTHKLSKFVDTTDLMRGPEDLPGHWLVTGAKLCVEKSNIFLRVKYSLLNY

SEQ ID NO: 798 - protein, 570 aa, Asplenium australasicum
MADEDASSRGAFVTAVNAVQALGRGFDVTCDIRLLYCKGTPGSRLVVIDDDHNTDLRVSDGVVIPNVSPDIRARLEKPYRPSLGVQDFHKMSEEFNKKLFIGGDIPSGMFNAMFNFSGSWQVDSSMTKSLAIDGLVLPLYSVHLRSPFILCEEVKNAVPNTWDPAALASFIEKYGTHIIRSVEVGGKDTIYVKQHPSSTLTKEEVESHLTKLVESRFQGRESDVIRRKDKENTDSSSSLTGKEDITVIYRRRGGDDLVQDHVDWKKTVNFNPDILSMAFFPIVLLLDPGTGREHLNRAIEAHLKYKPPLEELHYLLEFHVTRAWAPLANPAGPSRKEPVCPALQFSLMGPKLFINMSQVSVGRKPVTGLRLCLEGSKLNRLAVHVQHLTVLPKILQPHWDAYVAIGAPKWHGPEEQDSRWFEPVLWKNFAHVSTAPVEFSETWFGDASGAYIVTGAQLGVWDFGLKSVLHLKLLYSKVPGCTIRRSVWDHAPIGGQQQSKAKGASSASPAALDAAAAATQATQKLSKFVDTSEMARGPQDLPGHWLVTGAKLCVGKSNIFLRVKYSLLNY

SEQ ID NO: 799 - protein, 511 aa, Polystichum polyblepharum (C.)
MLHVTSDFCTARAHRAQDWLSLMMTTLPISMFRMVWLSQMFLKTLKQGWRNHFAPLMGCKTLIRCQSCSTRNWVSEERSRQECLMPCSIFQDHGSFIEKYGTHIIISVEVGGKDTIYVKQHLSSSLTKSEVDSHVKKLVETRFQGMESGVTQAKDKFQELALTNPQKNRSQLVHDDGSSSLTSKEDITVIYRRRGGDDLVQDHLEWKKTVNTNPDILSMAFFPIVVLLDAGSGREHLNRAIEAHLQYKPPLEELQYFLEFQVTRAWAPVANQVGLPRKEPVCPSLQFSLMGPKLFISTDQVSVGRKPVTGLRLCLEGSKLNRLAVHLQHLTVLPKILQPHWDAYVAIGAPKWHGPEEQDSRWFEPVLWKNFAHVSTAPVEFSETWFGDASGAYIVTGAQLGVWDFGLKSVLHLKLLYSKVPGCTIRRSVWDHTPIGQQLSKAKKGTSSATAAAAAAATVTQTTQKLSKFVDTTEMARGPQDLPGHWLVTGAKLCVEKSNIFLRVKYSLLNY

SEQ ID NO: 800 - protein, 583 aa, Davallia fejeensis
MASEDASLPGARATALNAVQALGRGFDVTCDIRLLYCKGTPGSRLVVVDDHTTDLKVANGLVIHNVSKDIKARLEKPSRAYQGVQDFDQMSELFNKKLFIEGKIPSGMFNAMFNFSGSWQVVAIDGMHIPLYSVHLRSPFILCDEVKRAVPSTWDPPALASFIEKYGTHIIRSVEVGGKDIIYVKQHPSSNLTKSEVETHLKKLVETRFQGMESGLVHQKDEYQELTLMNQQKNRSQLVHADGSSSLTGKEDITVIYRRRGGDDLVQDPLEWKKTVNSNPDILTMAFFPIVLLLDPGPGREHLHRAIEAHLKYKPPLEELQYFLEFQVTRAWAPLSNQVGLPRKEPVCPSLQFSLMGPKLFISTDQVSVGRKPVTGLRLCLEGSKLNRLAVHVEHLTVLPKILQPHWDAYVAIGAPKWHGPEEQDSRWFEPVLWKNFAHVSTAPVEFSETWFGDASGAYIVTGAQLGVWDFGVKSVLHLKLLYSKVPRCTIRRSVWDHTPIGQQLSKAKKGASSTAAAAVAAAASIGAAATSQAMQKLSKFVDTTEMSRGPQDLPGHWLVTGAKLCVEKSNIFLRVKYSLLNY

SEQ ID NO: 801 - protein, 462 aa, Asplenium antiquum (makino)
MFNAMFNFSGSWQVDSSMTKSLAIDGLVLPLYSVHLRSPFILCEEVKKAVPNIWDPVALASFIEKYGTHIIRSVEVGGKDTIYVKQHPSSTLTKEEVESHLTKLVESRFQGRESDVIRRKDKENTDSSSSLTGKEDITVIYRRRGGDDLVQDHVDWKKTVNFNPDILSMAFFPIVLLLDPGTGREHLNRAIEAHLKYKPPLEELHYLLEFHVTRAWAPLANPAGPSRKEPVCPALQFSLMGPKLFINMSQVSVGRKPVTGLRLCLEGSKLNRLAVHVQHLTVLPKILQPHWDAYVAIGAPKWHGPEEQDSRWFEPVLWKNFAHVSTAPVEFSETWFGDASGAYIVTGAQLGVWDFGLKSVLHLKLLYSKVPGCTIRRSVWDHAPIGGQQQSKAKGASSASPAALDAAAAATQATQKLSKFVDTSEMARGPQDLPGHWLVTGAKLCVEKSNIFLRVKYSLLNY

SEQ ID NO: 802 - protein, 619 aa, Platycerium bifurcatum var bifurcatum
MANEDVSRGARATAINAVQAIGRGFDITCDIRLLYCKGTPGSRLVVIDDDHTADLQVADDLVIQNVSKDIKARIEKPSRAYQGILDFDQMSELFNKKLSIDGKVPSGMFNAMFNFSGSWQVDSPSTKSLATDGMHIPLYSVHLRPPFILCEEVKRAVPSTWDPPALAIRSVEAGGKDIIYMKQHSSSILSKTEVETHLKKLVEARFQDLDLQSNDEELKLSNPQKHRSQLVHADGSSSLTGKEDITVIYRRRGGDDLVQDPREWKKTVKSNPDILTMSFFPIVLLLDPGPGREHLNRAIDAHLKYKPPLEELQYFLEFQVTRAWAPVANQVGLPRKEPVCPDAHLKYKPPLEELQYFLEFQVTRAWAPVANQVGLPRKEPVCPSLQFSLMGPKLYISTDQVSVGRKPVTGLRLCLEGSKLNRLAVYVEHLTVLPKILQPHWDAYVAIGAPKWHGPEEQDSRWFEPVLWKNFAHVSTAPVEFSETWFGDASGAYIVTGAQLGVWDFGVKSVLHLKLLYSKVPGCTIRRSVWDHTPIGQQVSKAKKGASSAAAAAAGVAAAAIGAAASSTQAMQKLSKLIDTTEMSRGPQDLPGHWLVTGAKLCVEKGNIFLRVKYSLLNY

SEQ ID NO: 803 - protein, 594 aa, Tupidanthus calyptratus
MEPRKNMSSDALNTTLWNSIQALGRGFDVTSDIRLLYCKGIPGSRLVQINDGVTKDLAVSDGFVVPNVSVDIESSRGEEVTETTAVCSFHEMAIYFNEKSEISGHVPLGSFNAMFNLTGSWQLDAATTKSLAMIGSVIPLYKVELANLDLVLNEEVKRAVPYSWDPASLASFIENYGTHIVTSATVGGRDVVYIRQHQSSPLSVSDIENYVKDIADQRYSGSRSNPSAAPLKYKDKDVTVIFRRRGGDDLEQSHVRWAETVQTSPDVINMTFIPIVSLLEGVPGIKHLARAIELYLEYKPPIEDLQYFLEFQIARVWAPEQSNIQRKDPVCPSLHFSLMGPKLYISPDQVTVGRKPVTGLRLTLEGTKQNRLAIHLQHLVSLPKILQPHWDAHMAIGAPKWQGPEEQDSRWFEPIKWKNFSHVSTAPIEHTETCIGDLSGVYIVTGEPIKWKNFSHVSTAPIEHTETCIGDLSGVYIVTGAQFGVWDFGASKSVLHLKLLFSKVPGCTIRRTVWDHSPSNVSGVQRSNGASTSLLHERTTDSSGHIGKLAKIVDMTEMSKGPQDIPGHWLVTGAKLGVDKGKIVLRIKYSLLNY

SEQ ID NO: 804 - protein, 586 aa, Hedera helix (Galaxy)
MGENAAALHTAMNSVQALGKGFDVNFDTRLLYCKGVAGSRIVEIDEEHTRDLCLYDGLVVPNVSKDVHNSQETIGRDGSGVCNYFEMMEYVNKKANLSENVPLGCFNAAFNFTSCKNIDAAATKTLCLDGFFIPLAKVQLVKSQLALQENVIRAVPASWDPPALASFIENFGTHVIVSVTIGGKDVIYVKQHQSSSLSKVEIKNYVQDIGNQRFSTTENHTTSGLLKYKDKGVDPSLYNSQGVHPQPQPRTATSLIGNGKEDVTVIFRRRGGDDLEQSHPQWARTVRSSPDVIEMSFFPIIPLLEGVTGKEHLAQAIDLYLEYKPQIEELRYFLEFQVPRIWAPTQDRPLGYQRKEPVCPSLQFSMMGQKLYISQEQVSVGRKPVTGICLCLEGSKQNRLSIHLQHLACLPKILQPYWDTHVAIGAPKWQGPEEQDSRWFEPVKWKNFSHVSTAPIESPETFIGDQSGVYIVTGAQLGVWDFGSRNVLYMKLLFSRLPGCTIRRSLWDHKPNDKLKKLAATGNNCGDSSSGSGETLAGNKLAKFVDMSAMSKGPQDAPGHWLVAGGKLGVQKGKIVLRVKYSLLNY

SEQ ID NO: 805 - protein, 386 aa, Tupidanthus calyptratus
MEENAAALHTAMNSVQALGRGFDVNFDIRLLYCKGVAGSRIVEIDEEHTRDMCLYDGLVVPNVSKDVHNSQETIGRDGSGVCNYFEMVEYINKKANLSENVPVGCFNAAFNFTGCKHIDAAATKTLCLDGFFIPLAKVQLVKSQLVLQENVIRAVPASWDPPALASFIENFGTHVIVSVTIGGKDVIYVKQHQSSPLSKVEIKKYVQDIGNQRFSTTENHTISGLLKYKDKGVDPSLYNSQGVHPQPSTATSLIGNGKEDVTVIFRRRGGDDLEQSHTQWARTVRSSPDVIEMSFFPIIPLLEGVTGKEHLAQAIDLYLEYKPQIEELRYFLEFQVPRIWAPIQDRPPGYQRKEPVCPSLQFSMMGQKLYISQEQVSVGRKPVTGS

SEQ ID NO: 806 - protein, 575 aa, Davallia fejeensis
MASEDASLPGARATALNAVQALGRGFDVTCDIRLLYCKGTPGSRLVVVDDHTTDLKVANGLVIHNVSKDIKARLEKPSRAYQGVQDFDQMSELFNKKLFIEGKIPSGMFNAMFNFSGSWQVESLAIDGMHIPLYSVHLRSPFILCDEVKRAVPSTWDPPALASFIEKYGTHIIRSVEVGGKDIIYVKQHPSSNLTKSEVETHLKKLVETRFQGMESGLVHQKDEKNRSQLVHADGSSSLTGKEDITVIYRRRGGDDLVQDPLEWKKTVNSNPDILTMAFFPIVLLLDPGPGREHLHRAIEAHLKYKPPLEELQYFLEFQVTRAWAPLSNQVGLPRKEPVCPSLQFSLMGPKLFISTDQVSVGRKPVTGLRLCLEGSKLNRLAVHVEHLTVLPKILQPHWDAYVAIGAPKWHGPEEQDSRWFEPVLWKNFAHVSTAPVEFSETWFGDASGAYIVTGAQLGVWDFGVKSVLHLKLLYSKVPRCTIRRSVWDHTPIGQQLSKAKKGASSTAAAAVAAAASIGAAATSQAMQKLSKFVDTTEMSRGPQDLPGHWLVTGAKLCVEKSNIFLRVKYSLLNY

SEQ ID NO: 807 - protein, 592 aa, Cissus discolor (blume)
MADFPAPVPPSLSSLLKNSDFSSLSIDYPATTTSGSGRNALISTLCNSIQALGRGFDVTSDIRLLYCKGTPGSRPVIVDEENTRDLVVSDGLVIPNVSVDIEVSRGKRTQETTPVCGFHEMAQHFNELSGISGNVPLGSFNAMFNFTGSRHVDAAATKSLAMVGYYIPLFTVELANSNLTLREEIKRAIPFSWDPASLASFIENYGTHIVTSATVGGRDVVYVRQHQSSPLSLSDIENYVKDIGDQRFLDPKSQPTSAPLKYKDKDVTVIFRRRGGDDLEQSHAKWAETVELAPDVINMTFVPIVSLLDDVPGLKHLSRAVDLYLEYKPPIEDLQYFLEFQIARIWAPELNKLQRKEPVCPSLQFSLMGPKLYISPDQVTIGRKPVTGLRLSLEGSKQNRLAIHLQHLVSLPKILQPHWDAHMAIGAPKWQGPEEQDSRWFEPIKWKNFSHVSTAPIEHTETCIGDLSGVHIVTGAQLGVWDFGAKSVLYLKLLFSKVPGCTIRRSVWDHSPSTPSTSQKPDGSSSSLLTEKTEDKKGDSSSQTGKLIKIVDITEMCKGPQDIPGHWLVTGAKLGVDKGKIVLRIKYSLLNY

SEQ ID NO: 808 - protein, 408 aa, Tupidanthus calyptratus
MGENAAALHTAMNSVQALGRGFDVNFDIRLLYCKGVAGSRIVEIDEEHTRDMCLYDGLVVPNVSKDVHNSQETIGRDGSGVCNYFEMVEYINKKANLSENVPVGCFNAAFNFTGCKHIDAAATKTLCLDGFFIPLAKVQLVKSQLVLQENVIRAVPASWDPPALASFIENFGTHVIVSVTIGGKDVIYVKQHQSSSLSKVEIKNYAQDIGNYVKQHQSSPLSKVEIKKYVQDIGNQRFSTTENHTTSGLLKYKDKGVDPSLYNSQGVHPQPSTATSLIGNGKEDVTVIFRRRGGDDLEQSHTQWARTVRSSPDVIEMSFFPIIPLLEGVTGKEHLAQAIDLYLEYKPQIEELRYFLEFQVPRIWAPIQDRPPGYQRKEPVCPSLQFSMMGQKLYISQEQVSVGRKPVT

SEQ ID NO: 809 - protein, 583 aa, Ophioglossum pendulum
MEEDDNDSALKASIVVNALQTLGRGFDLTCDIRIIYCKGTERSRLIEIDEEHTKTLEVPGGISIPNVSRDIKCVQGTEEHFSTGVLDFEQMAGYFNEVLSLSGKTASGVFNAVFNFSGSWNSDALATKSLAVDGWSIILYSLSLTRAPLTLIHEVKAAVPYTWDPAALASFIEKYGTHIVTSVSVGGKDAIYVKQHQSSTLTSTDVELHLKELRSIRFSPYGGHISFLGNEKVADQMLFSTQQILPQPCNSNGSSSFAGKEDITVIYRRRGGNDLVKGHDEWKKTVPTNPDVVTMTFIPITSLLEDGPCKDHLNRAILVYLEYKPPIEELQYFLAFQVARVWAPVQNELGPPRREPVCPALQFSLMGPKLYISTEQVSVGRRPVTGLRLSLEGRNCNRLAVHVQHLTSLPKVLQPHWDAYIAIGAPKWHGPEEQDSRWFEPVLWRNFSHISTAPVEFNETWIGDASGAFVVTGAQLGVWDFGLKSVLYLRLLYSKVPGCTIRRSVWDHTPVSLNQNLKMDSSKVLNTVPTATSQTPKLLKFVDTTEMSRGAQDMPGHWLVTGAKLGVDKSKIFLRVRYSLLNY

SEQ ID NO: 810 - protein, 563 aa, Pandorea pandorana (Golden Showers)
MDSSPKKDLSSGGGFTVSENALIITLLNSIQALGRGFDVTSDIRLLYCKGTPGSRLVNIDEGQTRNLEISESYAIPDVSVDIECSRGKSSSEKTPVWSFHEMAKYFNEKSSVPGNIPLGSFNAMFNFSGSWQLDAAATKSLAMVGYVIPLFRVKLANPNLALRDEIKRAVPYSWDPASLASFIENYGTHIVTSATIGGRDVGYIRQHQSSPLSISDIENYVKDIGDQRFSDSKTNTSAGALKYKDKDVTVIFRRRGGDDLEQSYAKWATTVEGAPDVINMTFTPIVSLLEGVAGIKHLTRAIELYLEYKPPIEDLQYFLDFQISRVWAPEQNNLQRREPVCSSLQFSLMGPKLYISPDQVTVGRKPVTGLKLSLEGIKQNRLAINLQHLVSLPKILQPHWDAHMAIGAPRWQGPEEQDSRWFEPIKWKHFSHVSTAPIEYTDTCIGDLSGVHIVTGAQLGVWDFGAKSVLHLKLLFSKVPGCTIRRSVWDHSPSNLSQKHDGSSSSSLSNEKGEVGKLAKIMDMTEMSKGPQDMPGHWLVTGAKLGVDKGKIVLRVKYSLLNY

SEQ ID NO: 811 - protein, 577 aa, Equisetum
MASWELNIIYGSSVPWVWESIGGGIDTIHYMIKSWTDQEVDHCGLPCSKIRAGLYQVPTEIKCLPGRIMRHGTGVLDFEKMAQRFNKALSVNGKIPSGLFNAMFSFSGSWRADAHVTKSLALDGWFIMLYNLKLAQSSFKLRGEIKREVPSTWDPAALASFIERHGTHIVTSVTVGGKDAIYVKQHQSSSLTSMEIESYLKELGDRRFLARSKHSAFEMKEKGAGQSFPPPAQSLLPTSASDSSSSLTGKEDVTVIYRRRGGDDLVQNHEEWKYTIFSNPDVISMTFIPIASLLEGCPGKEHLIRAIDIYLEYKPPIEELQYFLEFQVAKVWAPVQNEGRLPRKEPVCPSLQFSLMGPKLYINTEQVSVGRRPVIGLRLCLEGSKVNRLSVHVLHLVALPKLLQPHWDSYVAIGPPKWHGPEEQDSRWFEPIQWKNFSHVSTAPIEYSEGWMGDDSGAHVVTGAQLGVWDFGPKSVLHLRLLYSKVPGCTIRRSIWDYNPNPSSFNPSINPSKASKEANASSSSNAPQVNKLAKFVDTEEMVKGPQDMPGHWLVTGAKLGVEKSKIFLRVKYSLLNY

SEQ ID NO: 812 - protein, 391 aa, Pandorea pandorana (Golden Showers)
MDSSPKKDLSSGGGFTVSENALIITLLNSIQALGRGFDVTSDIRLLYCKGTPGSRLVNIDEGQTRNLEISESYAIPDVSVDIECSRGKSSSEKTPVWSFHEMAKYFNEKSSVPGNIPLGSFNAMFNFSGSWQLDAAATKSLAMVGYVIPLFRVKLANPNLALRDEIKRAVPYSWDPASLASFIENYGTHIVTSATIGGRDVGYIRQHQSSPLSISDIENYVKDIGDQRFSDSKTNTSAGALKYKDKDVTVIFRRRGGDDLEQSYAKWATTVEGAPDVINMTFTPIVSLLEGVAGIKHLTRAIELYLEYKPPIEDLQYFLDFQISRVWAPEQNNLQRREPVCSSLQFSLMGPKLYISPDQVYYSELLYSVHRYVAFSFVSSSVPQSDFLCHD

SEQ ID NO: 813 - protein, 357 aa, Tupidanthus calyptratus
MEPRKNMSSDALNTTLWNSIQALGRGFDVTSDIRLLYCKGIPGSRLVQINDGVTKDLAVSDGFVVPNVSVDIESSRGEEVTETTAVCSFHEMAIYFNEKSEISGHVPLGSFNAMFNLTGSWQLDAATTKSLAMIGSVIPLYKVELANLDLVLNEEVKRAVPYSWDPASLASFIENYGTHIVTSATVGGRDVVYIRQHQSSPLSVSDIENYVKDIADQRYSESRSHPSAAPLKYKDKDVTVIFRRRGGDDLEQSHIRWAETVQTSPDVINMTFIPIVSLLEGVPGIKHLARAIELYLEYKPPIEDLQYFLEFQIARVWAPEQSNIQRKDPVCPSLHTYRGFTIFLGISNCSSLGPRAE

SEQ ID NO: 814 - protein, 438 aa, Platycerium bifurcatum
MAEVKRAVPSTWDPPALASFIEKYGTHIIRSVEAGGKDIIYMKQHSSSILSKTEVETHLKKLVEARFQDLDLQSNDEELKLSNPQKHRSQLVHADGSSSLTGKEDITVIYRRRGGDDLVQDPREWKKTVKSNPDILTMSFFPIVLLLDPGPGREHLNRAMDAHLKYKPPLEELQYFLEFQVTRAWAPVANQVGLPRKEPVCPSLQFSLMGPKLYISTDQVSVGRKPVTGLRLCLEGSKLNRLAVHVEHLTVLPKILQPHWDAYVAIGAPKWHGPEEQDSRWFEPVLWKNFAHVSTAPVEFSETWFGDASGAYIVTGAQLGVWDFGVKSVLHLKLLYSKVPGCTIRRSVWDHTPIGQQVSKAKKGASSAAAAAAGVAAAAIGAAASSTQAMQKLSKLIDTTEMSRGPQDLPGHWLVTGAKLCVEKGNIFLRVKYSLLNY

SEQ ID NO: 815 - protein, 368 aa, Tupidanthus calyptratus
MEPRKNMSSDALNTTLWNSIQALGRGFDVTSDIRLLYCKGIPGSRLVQINDRDAKDLRVSDEFVVPNVSVDIECSKGEKITETTPVCSFHEMAIYFNEKSEISGDVPLGSFNAMFNLTGSWQLDAATTKSLAMIGSVIPLYKVELANLDLVLNEEVKRAVPYSWDPASLASFIENYGTHIVTSATVGGRDVVYIRQHQSSPLSVSDIENYVKDIADQRYSESRSHPSAAPLKYKDKDVTVIFRRRGGDDLEQSHIRWAETVQTSPDVINMTFIPIVSLLEGVPGIKHLACAIELYLEYKPPIEDLQYFLEFQIARVWAPEQSNIQRKDPVCPSLHFSLMGPKLYISPDQVPCLVFNTLLLNCCYEPMV

SEQ ID NO: 816 - protein, 444 aa, Lygodium flexuosum
MAEEDILFRGARSTALNAIQALGRGFDVTCDIRLLYCKGTAGTHLVKVDEDHKGDLELPKGLRIPNVSIDIKARPEKCTRHSLGVLEFDQMSEAFNKLLAIPGKTPLGMFNAMFSFSGSWQADAASTKRLAVDGWIIPLYSVHLRPPFILCEEVKKTVPSSWDPAALASFIEKYGTHIIISVEVGGKDVIYVKQHQSSTLSKSEIEMHLKRLVETRFHGAQNSYMETEEKVEEPAIFTSHKIRSQPTHADSSSSLTGKEDITVIYRRRGGDDLIQDHFEWRDSIFGNPDVLTMSFFPIVLLLDSGSGMENLTRAIEAYLKYKPPLEELQYFLEFLAPRAWAPVASQVGPPRKEPVCPFLQFSLMGQKLFISTDQVSVGRKPITGLRLSLEGSKLNRLAFQRPGHLWPAKLALPEKNLYAHFYSLVSWVRSSSSVQIRFLLAGSQ

SEQ ID NO: 817 - protein, 469 aa, Asplenium antiquum (makino)
MFNAMFNFSGSWQVDSSLTKRLAVDGLVLPLYSVHLRSPFILCEEVKKAVPNIWDPVALASFIEKYGTHIIRSVEVGGKDTIYVKQHPSSTLTKEEVESHLTKLVESRFQGRESDVIRRKDKENTDSSSSLTGKEDITVIYRRRGGDDLVQDHVDWKKTVNFNPDILSMAFFPIVLLLDPGTGREHLNRAIEAHLKYKPPLEELHYLLEFHVTRAWAPLANPAGPSRKEPVCPALQFSLMGPKLFINMSQVSVGRKPVTGLRLCLEGSKLNRLAVHVQHLTVLPKILQPHWDAYVAIGAPKWHGPEEQDSRWFEPVLWKNFAHVSTAPVEFSETWFGDASGAYIVTGAQLGVWDFGLKSVLHLKLLYSKVPGCTIRRSVWDHTPTGQQQSKGTKGTSSASPAAGTAAAPAAAAAAAATPATQKLSKFVDMSEMARGPQDLPGHWLVTGAKLCVEKSNIFLRVKYSLLNY

SEQ ID NO: 818 - protein, 561 aa, Asplenium nidus var plicatum
MTDEDASSRGAFVTAVNAVQALGRGFDVTCDIRLLYCKGTPGSRLVVIDDDHNTDLRVSDGVVIPNVSPDIRARLEKPYRPSLGVQDFHKMSEEFNKKLFIGGDIPSGMFNAMFNFSGSWQVDSSMTKSLAIDGLVLPLYSVHLRSPFILCEEVKNAVPNTWDPAALASFIEKYGTHIIRSVEIGGKDIIYVKQHPSSTLTKHEVESHLKKLVESRFQAMESDVIRRKDKENSESSSSLTGKEDITVIYRRRGGDDLVQDHVEWKKTVNSNPDILSMAFFPIVLLLDAGSGREHLNRAIEAHLKYKPPLEELHYFLEFHVARAWAPLANPVGPPRKEPICPALQFSLMGPKLFINTSQVSVGRKPVTGLRLSLEGSKLNRLAVHVQHLAVLPKILQPHWDAYVAIGAPKWHGPEEQDSRWFEPVLWKNFAHVSTAPVEFSETWFGDASGAYIVTGAQLGVWDFGLKSVLHLKLLYSKVPGCTIRRSVWDHTPTGQQQSKGTKGTSSASPAAGTAAALVALLLLLLVALLLLLLVALLLLLLVACCCCCCCDTGHPETLQVC

SEQ ID NO: 819 - protein, 304 aa, Symphoricarpos x chenaultii (Hancock)
MDDALTTTLFNSIQALGRGFDVTSDIRLLYCKGAPGSRLIHLDDQHVKDLVLNDGFVVPNVSVDVECSTGNRNPETISVCSFHEMAKYFNEKSDISGHVPLGSFNSMFNFTGSRQIDAAATKSLAMIGYVIPLYKVKLSISNLVLHEDVNRAVPYSWDPASLASFIENYGTHIVTSATVGGRDIVYIRQHQSSPLSAPDIDNYVKDIGDQRFSEVKGHQSAGPLKYKDKDVTVIFRRRGGDDLEQSHSKWSETVRRAPDVINMTFTPIASLLEGVPGIKHLARAIDLYLECKYSSCFSLFPLLV

SEQ ID NO: 820 - protein, 560 aa, Tupidanthus calyptratus
MEPRKNMSSDALNTTLWNSIQALGRGFDVTSDIRLLYCKGIPGSRLVQINDGVTKDLAVSDGFVVPNVSVDIESSRGEEVTETTAVCSFHEMAIYFNEKSEISGHVPLGSFNAMFNLTGSWQLDAATTKSLAMIGSVIPLYKVELANLDLVLNEEVKRAVPYSWDPASLASFIENYGTHIVTSATVGGRDVVYIRQHQSSPLSVSDIENYVKDIADQRYSESRSHPSAAPLKYKDKDVTVIFRRRGGDDLEQSHIRWAETVQTSPDVINMTFIPIVSLLEGVPGIKHLARAIELYLEYKPPIEDLQYFLEFQIARVWAPEQSNIQRKDPVCPSLHFSLMGPKLYISPDQVTVGRKPVTGLRLTLEGTKQNRLAIHLQHLVSLPKILQPHWDAHMAIGAPKWQGPEEQDSRWFEPIKWKNFSHVSTAPIEHTETCIGDLSGVYIVTGAQFGVWDFGASKSVLHLKLLFSKVPGCTIRRTVWDHSPSNVSGVQRSNGASTSLLHERTTDSSGHIGKLAKIVDMTEMSKGPQDIPGHWLVTGAKLGVDKGKIVLRIKYSLLNY

SEQ ID NO: 821 - protein, 376 aa, Phormium (Lancer Terra Cotta)
MEKNKNEKAAALIATLWNSVQALGRGFDVTADTRLLYCKGAAGSRFVQIGEGQIRDFVVTEGGAVLRDVPVDVEISRERRVRDTTRVCSFREMAEYFNKKSGLFETVPLGSFNSMFSLTGSWKIDAAATKTLAMDGYFIPLFKVKLTDPALILREDIKRAVPRSWDPPSLANFIENFGTHIITSVKIGGKDVVYIKQHHSSLLSTSDIEKYLTEIGDQRFSDLENQFADALLLNNRDGRPQLSSVPHLSGKEDVTVIFRRRGGDDLVQNHAEWAATVSSAPDVINMTFIPIVSLLEGLPGIQYLARAIDLYLDYKPPIEELQYFLEFQIQRVWHAIFFQIHLKLNSMKSHALIAIHKYKHIQSETSGTESNISNSR

SEQ ID NO: 822 - protein, 579 aa, Verbascum chaixii (Vill)
MEENAAALHTAINSVQALGRGFDVNCDTRLLYCKGVAGSRIVDIDEEHPRDLYLSDNLVVPNVSRDIKSSVEAGGRDGFGVCSYSEMVEYFNRKADLSGQTPLGSFNVAFSYTGSKHIDAASTKSLCMDGFFIPLAKIQLVKASMSLNENVRRAVPTSWDPPGLASFIENFGTHVITSVTIGGKDVIYVKQHLSSPLAMVEIKNYVQDIGNQRFSSPEGLTNSGLLRYKDKGSDPSLFNSQGIYPQPASAPYLSWSGKEDVTVIFRRRGGDDLEQSHIQWVQTVRSSPDVIEMSFFPITELLDGVRGKEHLARAIALYLEYKPQIEELRYFLEFQVPRIWAPVSDRFPGQPRKEPVCPSLQFSMMGQKLYVSQEQVSVGRKPVTGMRLCLEGSKQNRLSIHLQHLASLPKILQPHWDTHMAIGAPKWQGPEEQDSRWFEPVKWKKFSHVSTAPIENPETFIDDVTGVYIVTGAQLGVWDFGSRNVLHMKLLYSKLPGCTIRRSLWDHAPDENQKKQNSDESSSSSGENYVGNKLAKFVEMSEMSKGPENHPGHWLVTGGKLGVEKGRIVVRVKYSLLNY

SEQ ID NO: 823 - protein, 388 aa, Tupidanthus calyptratus
MGENAAALHTAMNSVQALGRGFDVNFDIRLLYCKGVAGSRIVEIDEEHTRDMCLYDGLVVPNVSKDVHNSQETIGRDGSGVCNYFEMVEYINKKANLSENVPVGCFNAAFNFTGCKHIDAAATKTLCLDGFFIPLAKVQLVKSQLVLQENVIRAVPASWDPPALASFIENFGTHVIVSVTIGGKDVIYVKQHQSSSLSKVEIKNYAQDIGNQRFSTTENHTTSGLLKYKDKGVDPSLYNSQGVHPQPSTATSLIGNGKEDVTVIFRRRGGDDLEQSHTQWARTVRSSPDVIEMSFFPIIPLLEGVTGKEHLAQAIDLYLEYKPQIEELRYFLEFQVPRIWAPIQDRPPGYQRKEPVCPSLQFSMMGQKLYISQEQVRFCVFVNTLLSW

SEQ ID NO: 824 - protein, 608 aa, Tupidanthus calyptratus
MEENAAALHTAMNSVQALGRGFDVNFDIRLLYCKGVAGSRIVEIDEEHTRDMCLYDGLVVPNVSKDVHNSQETIGRDGSGVCNYFEMVEYINKKANLSENVPVGCFNAAFNFTGCKHIDAAATKTLCLDGFFIPLSKVQLIKSQLVLQENVIDGFFIPLAKVQLVKSQLVLQENVIRAVPASWDPPALASFIENFGTHVIVSVTIGGKDVIYVKQHQSSPLSKVEIKKYVQDIGNQRFSTTENHTISGLLKYKDKGVDPSLYNSQGVHPQPSTATSLIGNGKEDVTVIFRRRGGDDLEQSHTQWARTVRSSPDVIEMSFFPIIPLLEGVTGKEHLAQAIDLYLEYKPQIEELRYFLEFQVPRIWAPIQDRPPGYQRKEPVCPSLQFSMMGQKLYISQEQVSVGRKPVTGMRLCLEGSKQNRLIIHLQHLACLPKILQPYWDTHVSIGAPKWQGPEEQDSRWFEPVKWKNFSHVSTAPIECPETFVGDQSGVYIVTGAQLGVWDFGSRNVLYMKLLFSRLPGCTIRRSLWDHKPNEESKKSAATGNNSGDSSSASGETLAGNKIAKSVDMSAMSKGPQDAPGHWLVTGGKLGVEKGKIVLRVKYSLLNY

SEQ ID NO: 825 - protein, 531 aa, Equisetum
MASWELNIIYGSSVPWVWESIGGGIDTIHYMIKSWTDQEVDHCGLPCSKIRAGLYQMAQRFNKALSVNGKIPSGLFNAMFSFSGSWRADAHVTKSLALDGWFIMLYNLKLAQSSFKLRGEIKREVPSTWDPAALASFIERHGTHIVTSVTVGGKDAIYVKQHQSSSLTSMEIESYLKELGDRRFLARSKHSAFEMKEKGAGQSFPPPAQSLLPTSASDSSSSLTGKEDVTVIYRRRGGDDLVQNHEEWKYTIFSNPDVISMTFIPIASLLEGCPGKEHEFQVAKVWAPVQNDGRLPRKEPICPSLQFSLMGPKLFINTEQVSVGRRPVTGLRLSLEGTKANRLCIHVQHLVALPKILRPHWDSYLAIGAPKWHGPEEQDSRWFEPIQWKNFSHVSTAPIEFNEAWMVDVSGAHVVTGAQLGVWDFGPKSVLHLRLLYSKVPGCTIRRSIWDYNPNPSSFNPSINPSKASKEANASSSSNAPQVNKLAKFVDTEEMVKGPQDMPGHWLVTGAKLGVEKSKIFLRVKYSLLNY

SEQ ID NO: 826 - protein, 587 aa, Aglaomorpha (Roberts)
MANEDACRGARATAVNAVQAIGRGFDVTCDIRLLYCKGTPGSRLVVIDDDDTVDLKVADDLVIQNVSKDIKVRFEKPSRAYQGVQDFDQMSELFNKKLFIEGKVPSGMFNAMFNFSGSWQVDSSITKSLAIDGMHIPLYSVHLRPPFILCDEVKRAVPSSWDPPALASFIEKYGTHIIRSVEVGGKDIIYVKQHPSSSLTKPEVETHLKKLVEARFQDLDIQSNDEELTFSNPQKNRSQLVHADGSSSLTSKEDITVIYRRRGGDDLVQDPREWKKTVKSNPDILTMSFFPIVLLLDPGPGREHLIRAIDAHLKYKPPLEELQYFLEFQVTRAWAPVANQVGIPRKEPVCPSLQFSLMGPKLYISTDQVSVGRKPVTGLRLCLEGSKLNRLAVHAEHLTVLPKILQPHWDAYVAIGAPKWHGPEEQDSRWFEPVLWKNFAHVSTAPVEFSETWFGDASGAYIVTGAQLGVWDFGLKSVLHLKLLYSKVPGCTIRRSVWDHTPLGQQVSKAKKGASSAAAAAAGVAAAAIGAAASTTQAMQKLSKFVDTTEMSRGPQDLPGHWLVTGAKLCVEKGNIFLRVKYSLLNY

SEQ ID NO: 827 - protein, 576 aa, Stenochiaena tenuifolia
MADEDASSRGARGTAVNAVQALGRGFDVTCDIRLLYCKGTPGSRLVVIDDEHTADLKLCDSLVISNAPTDVKARLDNPSCTFQGVQDFDQMSELFNKKLGIGGTIPSGTFNAMFNFSGSWQVDSSITKSLAVDGVVIPLYSLHLKAPFILCEEVKKAVPSVWDPAALASFIEKNGTHVIIGVEVGGKDIIYVKQHQSSSLTKTEVDLHLKKLVEMRFQEKESKEPALPPQKNRSQFVHADGPSSLTGKEDITVIYRRRGGDDLIQDHLEWKKSVHSNPDILSMTFFPIVLLLDAGSGREHLNRAIEAYLRYKPPLEELHFFLEFQVPRAWAPVASQVVLPRKEPVCPTLQFSLMGPKLFINTDQVSVGRRPVTGLCLCLEGSKFNRLAVHVQHLTVLPKILQPHWDAYVAIGAPKWHGPEEQDSRWFEPVLWKNFAHVSTAPVEFSETWFGDASGAYIVTGAQLGVWDFGVKSVLHLKLLYSKVPGCTIRRSVWDHTPTGLQQSKAKTGMSSTSATSAAATTTAMQTTQKLSKFVDTTEMARGPEDLPGHWVVTGAKLCVEKSNIFLRVKYSLLNY

SEQ ID NO: 828 - protein, 583 aa, Ophioglossum pendulum
MEEDDNDSALKTSIVVNALQTLGRGFDLTCDIRIIYCKGTERSRLIEIDEEHTKTLEVPGGISIPNVSRDIKCVQGTEEHFSTGVLDFEQMAGYFNEVLSLSGKTASGVFNAVFNFSGSWNSDALATKSLAVDGWSIILYSLSLTRAPLTLIHEVKAAVPYTWDPAALASFIEKYGTHIVTSVSVGGKDAIYVKQHQSSTLTSTDVELHLKELRSIRFSPYGGHISFLGNEKVADQMLFSTQQILPQPCNSNGSSSFAGKEDITVIYRRRGGNDLVQGHDEWKKTVPTNPDVVTMTFVPITSLLENGPRSDHLSRAILVYLEYKPPIEELQYFLAFQVARVWAPVQNELGPPRREPVCPALQFSLMGPKLYISTEQVSVGRRPVTGLRLSLEGRNCNRLAVHVQHLTSLPKVLQPHWDAYIAIGAPKWHGPEEQDSRWFEPVLWRNFSHISTAPVEFNETWIGDASGAFVVTGAQLGVWDFGLKSVLYLRLLYSKVPGCTIRRSVWDHTPVSLNQNLKMDSSKVLNTVPTATSQTPKLLKFVDTTEMSRGAQDMPGHWLVTGAKLGVDKSKIFLRVRYSLLNY

SEQ ID NO: 829 - protein, 253 aa, Tupidanthus calyptratus
MEPRKNMSSDALNTTLWNSIQALGRGFDVTSDIRLLYCKGIPGSRLVQINDRDAKDLRVSDEFVVPNVSVDIECSKGEKITETTPVCSFHEMAIYFNEKSEISGDVPLGSFNAMFNLTGSWQLDAATTKSLAMIGSVIPLYKVELANLDLVLNEEVKRAVPYSWDPASLASFIENYGTHIVTSATVGGRDVVYIRQHQSSPLSVSDIENYVKDIADQRYSESRSHPSAAPLKYKDKDSLYQAASIITFISIRH

SEQ ID NO: 830 - protein, 421 aa, Asplenium prolongatum x Asplenium antiquum (Kurata)
MADEDASLRGAFATAVNAVQALGRGFDVTCDIRLLYCKGTPGTRLVVIDDDHTTDLKLSDGLVIPNVSTDIRARLEKPSRPSLGVRGFDEMSEEFNKKLSIGGNIPSGMFNAMFNFSGSWQVDSSMTKRLAVDGLVLPLYSVHLRSPFILCEEVKKAVPNIWDPAALASFIEKYGTHIIRSVDVGGKDITYVKQHSSSTLTKEDVESHLKKLVESRFQGRESDVIRRKDKENTDSSSSLTGKEDITVIYRRRGGDDLVQDHVEWKKTVNFNPDILSMAFFPIVLLLDPGTGREHLNRAIEAHLKYKPPLEELHYFLEFHVTRAWAPLVNPAGPPKKEPVCPALQFSLMGPKLFINTSQVSVGRKPVTGLCLCLEGSKLNRLAVLVQHLTVLPKILQPHWDAYVAIGAPKWHGPEEQDSRWF

SEQ ID NO: 831 - protein, 565 aa, Phormium (Lancer Terra Cotta)
MEKNKNEKAAALIATLWNSVQALGRGFDVTADTRLLYCKGAAGSRFVQIGEGQIRDFVVTEGGAVLRDVPVDVEISRERRVRDTTRVCSFREMAEYFNKKSGLFETVPLGSFNSMFSLTGSWKIDAAATKTLAMDGYFIPLFKVKLTDPALILREDIKRAVPRSWDPPSLANFIENFGTHIITSVKIGGKDVVYIKQHHSSLLSTSDIEKYLTEIGDQRFSDLENQFADALLLNNRDGRPQLSSVPHLSGKEDVTVIFRRRGGDDLVQNHAEWAATVSSAPDVINMTFIPIVSLLEGLPGIQYLARAIDLYLDYKPPIEELQYFLEFQIQRVWPPAPSNIPGHQRKEPVCPFLQFSLMGPKLYISSEQISVGRKPVTGLRLCLEGIKQDRLAIHLQHLASLPKILRPHWDSHIAIGAPKWQGPEEQDSRWFEPIKWKNFAHVSTAPIQNTETNIGDLSGVYIVTGAQLGVWDFGAKSVLHLKLLFSKVPGCTIRRSVWDHSPSISRPQRPDEPSSSSGDNSSQLGKLAKIVDSTEMSKGPQDTPGHWLVTGAKLGVIYFSSTETR

SEQ ID NO: 832 - protein, 300 aa, Tupidanthus calyptratus
MEPRKNMSSDALNTTLWNSIQALGRGFDVTSDIRLLYCKGIPGSRLVQINDGVTKDLAVSDGFVVPNVSVDIESSRGEEVTETTAVCSFHEMAIYFNEKSEISGHVPLGSFNAMFNLTGSWQLDAATTKSLAMIGSVIPLYKVELANLDLVLNEEVKRAVPYSWDPASLASFIENYGTHIVTSATVGGRDVVYIRQHQSSPLSVSDIENYVKDIADQRYSESRSHPSAAPLKYKDKDVTVIFRRRGGDDLEQSHIRWAETVQTSPDVINMTFIPIVSLLEGVPGIKHLACAIELYLECKI

SEQ ID NO: 833 - protein, 323 aa, Ophioglossum pendulum
MEDDDSALKVSIAVNALQTLGRGFDLTCDIRIIYCKGTEGSRLLEIDEEHTKNLELPGGISIPDVSRDIKCVQGTEKHFSTGVLHFEQMAGYFNEVLSLSGKTASGVFNAVFNFSGSWNSDALATKSLAVDGWSIILYSLSLTRAPLTLIHEVKAAVPYTWDPAALASFIEKYGTHIVTSVSVGGKDAIYVKQHQSSTLTSTDVELHLKELRSIRFSPYGGHISFLGNEKVADQMLFSTQQILPQPCNSNGSSSFAGKEDITVIYRRRGGNDLVKGHDEWKKTVPTNPDVVTMTFIPITSLLEDGPCKDHLNRAILVYLESGS

SEQ ID NO: 834 - protein, 321 aa, Equisetum
MAEDEDPVVDPCRSLAVSAIQAMGRGFDLTCDIRLSYCKGVSPLVLLDQQNKKDLWLPGGISIPDAPAEIQCLHGRTSRHGTDVLNFDQMSERFNKALSIEGKIPSGLFNAMFSFSGSWRADASTTKSLALDGWFSTLYNLKLAKHSLKLHDEVKREVPSTWDPEALASFIEKHGTHIVTSVTVGGKDTIYVKQHQSNNISHHPLCLWKLNYLKELGDRRFLAGSSNSALDLNDKAAGQSSPITGPNLVQTLGSDGPSSLTGKEDVTVIYRRRGGDDLVQNHEEWKATIKSSPDVISMTFIPIASLLEGCPGKEHLICNTS

SEQ ID NO: 835 - protein, 289 aa, Rumohra adiantiformis
MADEDASFRGARGTAVNAVQALGRGFDVTCDIRLLYCKGTPGSRLVVIDDNHTTNLKVSDGLVIPDVSTDIKARLEKPSRPSLGVQDFDQMSELFNNKLGIGGKIPSGMFNAMFNFSGSWQVDSSITKGLALDGVFIPLYSVHLRSPFILRDEVKMAVPSTWDPPALASFIEKYGTHIIISVEVGGKDIVYVKQHPSSSLTKSEVDSHLRKLVETRFQGMESGVNQAKDKFQLVHADGSSSLTGKEDITVIYRRRGGDDLVQRRDQVSRHGKWCKSSKRQGKEVSVLHW

SEQ ID NO: 836 - protein, 581 aa, Vernonia noveboracensis
MEENAAALHTANNSVQALGKGFDVNFDTRLLYCKGVAGFKVVEIDEEHKRDIWLYDNLVVPNVSRDIENYQDPVNRISSGICSYHEMVEYFNKRANLSGNIPLGSFNAAFSFTGSKHIDAAATKTLCMDGYFIPLVKFELTKSNLVLQETVKRAVPTSWDPPALASFIENFGTHVITSITIGGKDVIYVKQHLSSSLSTIEIKNYVQDIGNQRFSNTENLTDSGLLRYKEKGGDPSLFSSQGVYPQPTSSSSLGGNAKEDVTVIFRRRGGDDLEQSHSQWEKTVKYSPDVIGMSFVPMASLLEGLPGKEHLTRAIDLYLEYKPQIEELRYFLEFQVPRVWAPLQDRLPGHQRKEPVCPSLQFSMMGQKLYVSQEQISVGRKPVTGIRLCLEGSKQNRLSIHLQHLQSLPKILRPYWDTHVAIGAPKWLGPEEQDSRWFEPVKWKNFSHVSSAPIESPESFIGDLSGVHIVTGAQLGVWDFGSRNVLYMKLLYSRLPGCTVRRSLWDHSPTDKSKRSAGPGNSVGDSSSGSSSSNKLAKFIDMAEMSKGPADPPGHWVVTGGKLGVEKGKIVLRLKYSLLNY

SEQ ID NO: 837 - protein, 472 aa, Asplenium antiquum (makino)
MFNAMFNFSGSWQVDSSMTKSLAIDGLVLPLYSVHLRSPFILCEEVKKAVPNIWDPVALASFIEKYGTHIIRSVEIGGKDIIYVKQHPSSTLTKHEVESHLKKLVESRFQATESDVIRRKDKENSESSSSLTGKEDITVIYRRRGGDDLVQDHVEWKKTVNSNPDILSMAFFPIVLLLDAGSGREHREHLNRAIEAHLKYKPPLEELHYFLEFHVARAWAPLANPVGPPRKEPICPALQFSLMGPKLFINTSQVSVGRKPVTGLRLCLEGSKLNRLAVHVQHLTVLPKILQPHWDAYVAIGAPKWHGPEEQDSRWFEPVLWKNFAHVSTAPVEFSETWFGDASGAYIVTGAQLGVWDFGLKSVLHLKLLYSKVPGCTIRRSVWDHTPTGQQQSKGTKGTSSASPAAGTAAAPAAAAAAAATPATQKLSKFVDMSEMARGPQDLPGHWLVTGAKLCVGKSNIFLRVKYSLLNY

SEQ ID NO: 838 - protein, 338 aa, Rumohra adiantiformis
MADEDASFRGARGTAVNAVQALGRGFDVTCDIRLLYCKGTPGSRLVVIDDNHTTNLKVSDGLVIPDVSTDIKARLEKPSRPSLGVQDFDQMSELFNNKLGIGGKIPSGMFNAMFNFSGSWQVDSSITKGLALDGVFIPLYSVHLRSPFILRDEVKMAVPSTWDPPALASFIEKYGTHIIISVEVGGKDIVYVKQHPSSSLTKSEVDSHLRKLVETRFQGMESGVNQAKDKFQLVHADGSSSLTGKEDITVIYRRRGGDDLVQDHLEWKKTVNLNPDILSMAFFPIVLLLDAGSGREHVNRAIEAHLKYKPPLEELQFFLEFQVSRAWAPAANQPLRLI

SEQ ID NO: 839 - protein, 584 aa, Sphaeropteris cooperi
MAEDDALLRGARGIALNAVQALGRGFDVTCDIRLLYCKGAPAGARLVKIDEENCWDLALSDGLRIPNVSVGIKARQEECKRLSLGVSDFDQMSELFNRKLGIMGKTPLGMFNAMFSFSGSSQIDASMTKSLAVDGWVIPLYSVHLRAPFMLCEEVRKAVPTTWDPSALASFIEKYGTHIIIGVEVGGKDVIYVKQHQSSILTKSEIELHLKRLVETRFQGVENSVFKAEDKLQELAMFTTQKIRSQPLHADGSSSLTGKEDITVIYRRRGGDDLVQDHFEWRKTVHSNPDVLSMSFFPIVGLLEPGSNVDNLNRAIDAYLTYKPPLEELQYFLEFQVPRAWAPVVNQVGPPRKEPVCPPLQFSLMGPKLFISTDQISVGRKPVTGLRLCLEGSKLNRLAVHVQHLTVLPKILQPHWDAYVAIGAPKWHGPEEQDSRWFEPVLWKNFAHVSTAPVEFNETWFGDASGAYIVTGAQLGVWDFGLKSVLHLKLLYSKVPGCTIRRSVWDHTPAPSGQQQQPKAKKGALSISSAAVPQTTQKLSKFVDTTELMRGPQDLPGHWLVTGAKLCVEKSNIFLRVKYSLLNY

SEQ ID NO: 840 - protein, 498 aa, Microsorum musifolium (Blume)
MSELFNKKLFIEGKVPSGMFNAMFNFSGSWQVDSSITKSLAIDGMHIPLYSVHLRPPFILCEEVKRAVPSTWDPPALASFIEKYGTHIIRSVEVGGKDIIYMKQHSSSTLSKAEVETHLKKLVEARFQDLDNQLNDEELTLSNPQKYRSQLVHADSSSSLTGKEDITVIYRRRGGDDLVQDPREWKKTVKSNPDILTMTFFPIVLLLDPGPNREHLIRAIDAHLKYKPPLEELQYFLEFQVTRAWAPVANQVGVPRKEPVCPSLQFSLMGPKLYISTDQVSVGRKPVTGLRLCLEGSKLNRLAVHVEHLTVLPKILQPHWDAYVAIGAPKWHGPEEQDSRWFEPVLWKNFAHVSTAPVEFSETWFGDASGAYIVTGAQLGVWDFGVKSVLHLKLLYSKVPGCTIRRSVWDHTPIGQQVSKAKKGASSAAAAAAGVAAAAIGAATSTTQTMQKLSKLIDTTEMSRGPQDLPGHWLVTGAKLCVEKGNIFLRVKYSLLNY

SEQ ID NO: 841 - protein, 587 aa, Platycerium wandae
MANEDVSRGARATAINAVQAIGRGFDITCDIRLLYCKGTPGSRLVVIDDDHTADLQVADDLVIQNVSKDIKARIEKPSRAYQGILDFDQMSELFNKKLSIDGKVPSGMFNAMFNFSGSWQVDSSSTKSLATDGMHIPLYSVHLRPPFILCEEVKRAVPSTWDPPALASFIEKYGTHIIRSVEAGGKDIIYMKQHSSSILSKTEVETHLKKLVEARFQDLDLQSNDEELKLSNPQKHRSQLVHADGSSSLTGKEDITVIYRRRGGDDLVQDPREWKKTVKSNPDILTMSFFPIVLLLDPGPGREHLNRAMDAHLKYKPPLEELQYFLEFQVTRAWAPVANQVGLPRKEPVCPSLQFSLMGPKLYISTDQVSVGRKPVTGLRLCLEGSKLNRLAVYVEHLTVLPKILQPHWDAYVAIGAPKWHGPEEQDSRWFEPVLWKNFAHVSTAPVEFSETWFGDASGAYIVTGAQLGVWDFGVKSVLHLKLLYSKVPGCTIRRSVWDHTPIGQQVSKAKKGASSAAAAAAGVAAAAIGAAASSTQAMQKLSKLIDTTEMSRGPQDLPGHWLVTGAKLCVEKGNIFLRVKYSLLNY

SEQ ID NO: 842 - protein, 323 aa, Phormium (Lancer Terra Cotta)
MEENAALRTIRSSIQALGRGFDVNYDTRLLYCKGVGGSRVVEVDEEHTRDVLAFEGLIVPGVSRDVRCFQEGRSRQSTGVCTYTEMIEYFNRKALLPGNVPLGSFNSVFCFSGSRKIDAAATRSLAMDGIFIPLCKVQLIKQPSSLQEDVRRAVPLTWEPSSLARFIENYGTHVITSITVGGKDEIYVKQHSSSPLSTIEIKNYIQDIGDQRFSDSESHTSSGPMKLKDKAADPFSFNSQGVYPQPPTAPYLNSKEDVTVIFRRRGGDDLVQSHYHWAKTVSFAPDVIQMTFLPITSLLDGIPWKDHLIRAITLYLECRNLDL

SEQ ID NO: 843 - protein, 324 aa, Asplenium prolongatum x Asplenium antiquum (Kurata)
MAEGDSSSRGAFVTGVNAVQALGRGFDATCDIRLLYCKGTPGTRLVVIDDDHTTDLKVSDGVVIPNVSTDIRARLEKPYRPSLGVQGFHEMSEEFNKKLSIGGNIPSGMFNAMFNFSGSWQVDSSMTKRLAVDGLVLPLYSVHLRSPFILCEEVKKAVPNIWDPAALASFIEKYGTHIIRSVDVGGKDIIYVKQHPSSTLTKHEVESHLKKLVESRFQAMESDVNQRKDKENSESSSSLTGKEDITVIYRRRGGDDLVQDHVEWKKTVNFNPDILSMAFFPIVLLLDPGTGREHLNRAIEAHLKYKPPLEELHYFLEFHVTRAW

SEQ ID NO: 844 - protein, 587 aa, Platycerium bifurcatum
MANEDVSRGARATAINAVQAIGRGFDITCDIRLLYCKGTPGSRLVVIDDDHTADLQVADDLVIQNVSKDIKARIEKPSRAYQGILDFDQMSELFNKKLSIDGKVPSGMFNAMFNFSGSWQVDSSSTKSLATDGMHIPLYSVHLRPPFILCEEVKRAVPSTWDPPALASFIEKYGTHIIRSVEAGGKDIIYMKQHSSSILSKTEVETHLKKLVEARFQDLDLQSNDEELKLSNPQKHRSQLVHADGSSSLTGKEDITVIYRRRGGDDLVQDPREWKKTVKSNPDILTMSFFPIVLLLDPGPGREHLNRAMDAHLKYKPPLEELQYFLEFQVTRAWAPVANQVGLPRKEPVCPSLQFSLMGPKLYISTDQVSVGRKPVTGLRLCLEGSKLNRLAVHVEHLTVLPKILQPHWDAYVAIGAPKWHGPEEQDSRWFEPVLWKNFAHVSTAPVEFSETWFGDASGAYIVTGAQLGVWDFGVKSVLHLKLLYSKVPGCTIRRSVWDHTPIGQQVSKAKKGASSAAAAAAGVAAAAIGAAASSTQAMQKLSKLIDTTEMSRGPQDLPGHWLVTGAKLCVEKGNIFLRVKYSLLNY

SEQ ID NO: 845 - protein, 267 aa, Symphoricarpos x chenaultii (Hancock)
MEENAAALHTAINSVGALGRGFDVNFDTRLLYCKGVAGSRVVEIDEEHSWDLRLYDSLVVPNVPREIKNSHETSGRDGFGVCSYHEMAEYFNKKANLSGHVPLGSFNAAFSFTGSKHIDAAATKTLCMDGYFIPLAKVQLNKSPLVLQENVRRAVPTSWDPPALASFIENFGTHIITSVTIGGKDVVYIKQHQSSPLSTTEIKNYVKDIGNQRFSSTESHTSSGQLNYKDKASSVMFLFSFSFSYSYFLFCLNLNLQSVSFSEFVGG

SEQ ID NO: 846 - protein, 355 aa, Verbascum chaixii (Vill)
MASMGSENALITTLCNSIQALGRGFDVTSDIRLLYCKGAPGSRLVHINEEQTRNLEISGSYAIPNVSVDIECSQGQSFNNKTPVWSFHEMAKYFNEKSGLPGNIPLGCFNAMFNFSGSRQLDAAATKSLAMVGYVIPLYMVKLAKPNLILRDEIKRAVPYSWDPASLASFIENYGTHIVTSATIGGRDVVYIRQHQSSPLSASDIENYVKDIGDQRFSDSKGNSSAGALKYKDKDVTVIFRRRGGDDLEQSYAKWAKTVEGAPDVITMTFTPIVSLLEGVAGIKHLARAIELYLEYKPPIEDLQYFLDFQISRAWAPEQNNNLQRKEPVCSSLQFSLMGPKLYISPDQVYIHILS

SEQ ID NO: 847 - protein, 264 aa, Waldsteinia ternata
MGENVAALNTAVNSVQAIGRGFDVNFDTRLLYCKGVAGSRVLEVDDEHTRDLCVYDDVIVPNVSREINLYQESSERRSSGVCSYNEMVEYFNQKSNISGGYPVGSFNFSFSFTGSKHVDMAATKTLSVDGFYIPLAKFQLLKTPLMLQENVTQAIPNCWDPTSLASFIENFGTHVITSVTIGGKDVIYVKQHHSSPLSTMEIKNYIQDIGNQRFANTESRTSSGQMNFMDKASSTLFHSLSVLFVIFFSVILFLFCLFNVKFKF

SEQ ID NO: 848 - protein, 578 aa, Didymochlaena truncatula
MADEDASFRGAHGTAVNAVQALGRGFDVTCDIRLLYCKGTPGSRLVVLDDELAGDLKISDGLVIPNVSKDIKSRLEKPSRPSQGVQDFDQMSELFNKKLGIGGKIPSGMFNAMFNFSGSWEVDSSITKGLAIDGVLIPLYSVHLRPPFILCEEVKRAVPSTWDPPALASFIEKYGTHIIMSVEVGGKDFIYVKQHPSSSLSKSEVDSHLKKLVETRFQGMESGVTQGTDKFQDLALSNPQKNRSQLVHADGSSSLTGKEDITVIYRRRGGDDLVQDHSEWKKTVFSNPDILSMAFFPIVLLLDAGSGREHLNRAIEAHLKYKPPLEELQYFLEFQVTRAWAPVANQVGLPRKEPVCPSLQFSLMGPKLFISTDQVSVGRKPVTGLRLCLEGSKLNRLAVHVEHLTVLPKILQPHWDAYVAIGAPKWHGPEEQDSRWFEPVLWKNFAHVSTAPVEFSETWFGDASGAYIVTGAQLGVWDFGLKSVLHLKLLYSKVPGCTIRRSVWDHTPTQLSKAKKGTSSATAAAASQTTQKLSKFVDTTEMARGPQDLPGHWLVTGAKLCVEKSNIFLRVKYSLLNY

SEQ ID NO: 849 - protein, 588 aa, Adiantum hispidulum
MAVDGASYRGAHSTALNALQALGRGFDVTCDIRLLHCKGSPGSRLVVVDDEHTAELKVLDSLGIPKVSTDIRARPEKPSRPSLGVQDFDQMSELFNKKLCIGGKIPSGIFNAMFSFSGSWQVDAAMTKSLALDGVSLPLYSVHLRPPFILREEVEKAVPSAWDPAALASFIEKYGTHIIMSVEVGGKDIVYVKQHQSSSLTKTEVELQLRKLVETRFQGTETSIAEVENKFQELPPLSSHKNHSKTVHAEGSSSLTGKEDITVIYRRRGGDDLVQDHLEWKKTVFTNPDVLSMSFFPIALLLDSGPGQEILNRAIEAYMIYKPPLEELQYFLEFQVPKAWAPVTNQSGPPRKEPVCPSLQFSLMGPKLFINTDQVSVGRKPVTGLRLCLEGSKLNRLAVHVQHLTVLPKILQPHWDAYVTIGAPKWHGPEEQDSRWFEPVLWKNFAHVSTAPVEFSETWFGDASGAYIVTGAQLGVWDFGMKSVLHLKLLYSKVPDCTIRRSVWDQLPNGLQQSKGKKGTSSASSPAVSSDGTSSATQTSMKLSKFVDTTELARGPQDLPGHWLVTGAKLGVEKSNVFLRVKYSLLNY

SEQ ID NO: 850 - protein, 594 aa, Blechnum gibbum
MAEENASSRGARVTAVNAVQALGRGFDVTCDIRLLYCKGTPGSRLVVIDDDHTADLKLSDSLVIPNVSTDIKARLDKPSFPSPGVQDFDQMSELFNKKLAIGGKIPSGMFNAMFNFSGSWQVDSSMTKSLAFDGVVIPLYSVHLRAPFILCEEVKKAVPTTWDPAALASFIEKYGTHVIISVDVGGKDIIYVKQHQSSPLTKSEVDLHLKKLVETRFQGMESGVIQAKDKFQELALNPQKNRSQLVHADGSSSLTGKEDITVIYRRRGGDDLVQDHLEWKKTVHSNPDILSMAFFPIVLLLDAGSGREHLIRAIEAHLKYKPPLEELHYFLEFQVPRAWAPAANQVGLPRKEPVCPTLQFSLMGPKLFISTDQVSVGRKPVTGLRLCLEGSKLNRLAVHVQHLTVLPKILQPHWDAYVAIGAPKWHGPEEQDSRWFEPVLWKNFAHVSTAPVEFSETWFGDASGAYIVTGAQLGVWDFGLKSVLHLKLLYSKVPGCTIRRSVWDHTPTLLQQSKGKTGTSSASPARFLVVPSGGRYGIIRPRCYNKARERRGHLVRVLLPLPPRLLRHKRLRNSPSLLILRRWQEVRKTCLVTG

SEQ ID NO: 851 - protein, 571 aa, Davallia fejeensis
MASEDASLPGARATALNAVQALGRGFDVTCDIRLLYCKGTPGSRLVVVDDHTTDLKVANGLVIHNVSKDIKARLEKPSRAYQGVQDFDQMSELFNKKLFIEGKIPSGMFNAMFNFSGSWQVVDGMHIPLYSVHLRSPFILCDEVKRAVPSTWDPPALASFIEKYGTHIIRSVEVGGKDIIYVKQHPSSNLTKSEVETHLKKLVETRFQGMESGLVHQKDEKNRSQLVHADGSSSLTGKEDITVIYRRRGGDDLVQDPLEWKKTVNSNPDILTMAFFPIVLLLDPGPGREHLHRAIEAHLKYKPPLEELQYFLEFQVTRAWAPLSNQVGLPRKEPVCPSLQFSLMGPKLFISTDQVSVGRKPVTGLRLCLEGSKLNRLAVHVEHLTVLPKILQPHWDAYVAIGAPKWHGPEEQDSRWFEPVLWKNFAHVSTAPVEFSETWFGDASGAYIVTGAQLGVWDFGVKSVLHLKLLYSKVPRCTIRRSVWDHTPIGQQLSKAKKGASSTAAAAVAAAASIGAAATSQAMQKLSKFVDTTEMSRGPQDLPGHWLVTGAKLCVEKSNIFLRVKYSLLNY

SEQ ID NO: 852 - protein, 308 aa, Tupidanthus calyptratus
MEPRKNMSSDALNTTLWNSIQALGRGFDVTSDIRLLYCKGIPGSRLVQINDGVTKDLAVSDGFVVPNVSVDIESSRGEEVTETTAVCSFHEMAIYFNEKSEISGHVPLGSFNAMFNLTGSWQLDAATTKSLAMIGSVIPLYKVELANLDLVLNEEVKRAVPYSWDPASLASFIENYGTHIVTSATVGGRDVVYIRQHQSSPLSVSDIENYVKDIADQRYSGSRSNPSAAPLKYKDKDVTVIFRRRGGDDLEQSHVRWAETVQTSPDVINMTFIPIVSLLEGVPGIKHLACAIELYLECYSWAKAGNWT

SEQ ID NO: 853 - protein, 588 aa, Adiantum pedatum
MADEDASHRGAHATALNAVQALGRGFDVTCDIRLLYCKGTPGSRLVVVDDEHTADLKVLDGLVIPKVSTDIRPRPEKPSRPSLGVQDFDQMSELFNKRLCIGGKIPSGIFNAMFSFSGSWQVDASMTKSLALDGVDLPLYSVHLRPPFILCEEVKKAVPSTWDPAALASFIEKYGTHIIMSVEVGGKDIVYVKQHQSSSLTKSEVELQLRKLVETRFQGMETAIVDVENKFQELPPLSSQKNQSKIVHADGSSSLTGKEDITVIYRRRGGDDLVQDHLEWKRTVYTNPDVLSMSFFPIVLLLDPGSGRENLNRAIEAYTSYKPPLEELQYFLEFQVPRAWAPVTNQLGLPRKEPVCPSLQFSLMGPKLFISTDQVSVGRKPVTGLRLCLEGSKLNRLAVHVQHLTVLPKILQPHWDAYVAIGAPKWHGPEEQDSRWFEPVLWKNFAHVSTAPVEFSETWFGDASGAYIVTGAQLGVWDFGMKSVLHLKLLYSKVPGCTIRRSVWDHTPTGLQQTKGKKGTSSASSPAVGSSGASSATQASQKLSKFVDTTELARGPQDLPGHWLVTGAKLCVEKSNVFLRVKYSLLNY

SEQ ID NO: 854 - protein, 288 aa, Vernonia noveboracensis
MEENAAALHTANNSVQALGKGFDVNFDTRLLYCKGVAGFKVVEIDEEHKRDIWLYDNLVVPNVSRDIENYQDPVNRISSGICSYHEMVEYFNKRANLSGNIPLGSFNAAFSFTGSKHIDAAATKTLCMDGYFIPLVKFELTKSNLVLQETVKRAVPTSWDPPALASFIENFGTHVITSITIGGKDVIYVKQHLSSSLSTIEIKNYVQDIGNQRFSNTENLTDSGLLRYKEKGGDPSLFSSQGVYPQPTSSSSLGGNAKEVCKAVFFISFLSYGYMMPYLFWVRRLFVI

SEQ ID NO: 855 - protein, 357 aa, Asplenium prolongatum x Asplenium antiquum (Kurata)
MESDVNQRKDKENSESSSSLTGKEDITVIYRRRGGDDLVQDHVEWKKTVNFNPDILSMAFFPIVLLLDPGTGREHLNRAIEAHLKYKPPLEELHYFLEFHVTRAWAPLANPVGPPRKEPICPGLQFSLMGPKLFINTSQVSVGRKPVTGLRLCLEGSKLNRLAVHVQHLTVLPKILQPHWDAYVAIGAPKWHGPEEQDSRWFEPVLWKNFAHVSTAPVEFSETWFGDASGAYIVTGAQLGVWDFGLKSVLHLKLLYSKVPGCTIRRSVWDHNPTGQQQSKATKGTSSASPAMGAAALVAATQVTQKLSVCGYVRDGQRPTRPAWPLASHWRKAVRGEEQNLSESEVLSSELLEAKWP

SEQ ID NO: 856 - protein, 395 aa, Verbascum chaixii (Vill)
MEENAAALHTAINSVQALGRGFDVNYDTRLLYCKGVAGSRIVDIDEEHPRDLYLSDNLVVPNVSRDIKSSVEAGGRDGFGVCSYSEMVEYFNRKADLSGQTPLGSFNVAFSYTGSKHIDAASTKSLCMDGFFIPLAKIQLVKASMSLNENVRRAVPTSWDPPGLASFIENFGTHVITSVTIGGKDVIYVKQHLSSPLAMVEIKNYVQDIGNQRFSSPEGLTNSGLLRYKDKGSDPSLFNSQGIYPQPASAPYLSWSGKEDVTVIFRRRGGDDLEQSHIQWAKTVRSSPDVIEMSFFPITELLDGVRGKEHLARAISLYLEYKPQIEELRYFLEFQVPRIWAPVSDRFPGQPRKEPVCPSLRVTIQHDGTKAICQPRASFSWTETRDRHATMSRRI

SEQ ID NO: 857 - protein, 493 aa, Ophioglossum pendulum
MAGYFNEVLSLSGKTASGVFNAVFNFSGSWNSDALATKSLAVDGWSIILYTLSLTRVPLTLIHEVKVAAPYTWDPAVLASFIERYGTHIVTSVSIGGKDVIYVKQHQSSTLTPTDVELHLKELRSVRFSPFGGHISFMMNEKVADQMLFSTQQIRPQPYNSDCSSSFTGKEDITVIYRRRGGNDLVKGHDEWKKTVPTNPDVVTMTFIPITSLLEDGPCKDHLNRAILVYLEYKPPIEELQYFLAFQVARVWAPVQNELGPPRREPVCPALQFSLMGPKLYISTEQVSVGRRPVTGLRLSLEGRNCNRLAVHVQHLTSLPKVLQPHWDAYIAIGAPKWHGPEEQDSRWFEPVLWRNFSHISTAPVEFNETWIGDASGAFVVTGAQLGVWDFGLKSVLYLRLLYSKVPGCTIRRSVWDHTPVSLNQNLKMDSSKVLNTVPTATSQTPKLLKFVDTTEMSRGAQDMPGHWLVTGAKLGVDKSKIFLRVRYSLLNY

SEQ ID NO: 858 - protein, 584 aa, Waldsteinia ternata
MGENVAALNTAVNSVQAIGRGFDVNFDTRLLYCKGVAGSRVLEVDDEHTRDLCVYDDVIVPNVSREINLYQESSERRSSGVCSYNEMVEYFNQKSNISGGYPVGSFNFSFSFTGSKHVDMAATKTLSVDGFYIPLAKFQLLKTPLMLQENVTQAIPNCWDPTSLASFIENFGTHVITSVTIGGKDVIYVKQHHSSPLSTMEIKNYIQDIGNQRFANTESRTSSGQMNFMDKGADSGLFNSQGIYPQPTTAPSLAGKEDVTVIFRRRGGDDLEQNHTRWARTVRSSPDVIEMTFFPIAALLEGVTGREHLSRAIGLYLEYKPPIEELRYFLEFQVPRIWAPVYDRNLAHQRKEPVCPSLQFSIMGQKLYVSQEQITVGRKPVTGLRLCLEGSKLNRLCIHLQHLVSLPKILRPYWDSHVAIGAPKWQGPEEQDSRWFEPVKWKNFSHVSTAPIENPETFIGDLSGVHVVTGAQLGVWDFGSKNVLFMKLLYSRLPGCTVRRSLWDHSPNEKSKKGKSSSLNVNAGDSSSGSRENVAGNKLMKLLDMSEMSKGPQDHPGHWLVTGGKLGVEKGKIVLRVKYSLLNY

SEQ ID NO: 859 - protein, 555 aa, Sphaeropteris cooperi
MAEDDTSFRGARATALNALQALGRGFDVTCDIRLLYCKGAPAGARLVKIDEENCWDLALSDGLRIPNVSVGIKARQEECKRLSLGVSDFDQMSELFNRKLGIMGKTPLGMFNAMFSFSGSSQIDASMTKSLAVDGWVIPLYSVHLRAPFMLCEEVRKAVPTTWDPSALASFIEKYGTHIIIGVEVGGKDVIYVKQHKLSILTKSEIELHLKKIVETRFQGMENSVLEAEDKDITVIYRRRGGDDLVQDHFEWRKTVHSNPDVLSMSFFPIVGLLEPGSNVDNLNRAIDAYLTYKPPLEELQYFLEFQVPRAWAPVVNQVGPPRKEPVCPPLQFSLMGPKLFISTDQISVGRKPVTGLRLCLEGSKLNRLAVHVQHLTVLPKILQPHWDAYVAIGAPKWHGPEEQDSRWFEPVLWKNFAHVSTAPVEFNETWFGDASGAYIVTGAQLGVWDFGLKSVLHLKLLYSKVPGCTIRRSVWDHTPAPSGQQQQPKAKKGALSISSAAVPQTTQKLSKFVDTTELMRGPQDLPGHWLVTGAKLCVEKSNIFLRVKYSLLNY

SEQ ID NO: 860 - protein, 394 aa, Waldsteinia ternata
MATRSSSSEALRTTLSNTIQALGRGFDVTSDIRLLYCKGAPGSRLVNLNETEAKDLAVSDGVVVPNVPADIQCSSGSRNTERVSVCSFHEMAEYFNKKSGISSRIPLGSFNAMFNFTGSWKVDASATKSLALVGYCIPLYKVDLGAENLVLHDEIKRAVPYTWDPAALASFIENYGTHIVTSATIGGRDVVYIRQHHSSPLSTSDIQSYVKDIGDDRFGDTKGQSSAGPLKYKDKDVTVIFRRRGGDDLEQSHSRWAETVQLAPDVINMTFTPIVSLLEGVPGIKHLSRAIELYLECKTQSRNSSFLIIVSVSLKNKLKTRSDIEVYSLQFYRFKSYKIPKFLLDKLTSLKNKLKTRSDIEVYSLQFYRFKSYKIPKFLLDKLTDSFIYDPIRT

SEQ ID NO: 861 - protein, 584 aa, Sphaeropteris cooperi
MAEDDTSFRGARATALNALQALGRGFDVTCDIRLLYCKGAPAGARLVKIDEENCWDLALSDGLRIPNVSVGIKARQEECKRLSLGVSDFDQMSELFNRKLGIMGKTPLGMFNAMFSFSGSSQIDASMTKSLAVDGWVIPLYSVHLRAPFMLCEEVRKAVPTTWDPSALASFIEKYGTHIIIGVEVGGKDVIYVKQHQSSILTKSEIELHLKRLVETRFQGVENSVFKAEDKLQELAMFTTQKIRSQPLHADGSSSLTGKEDITVIYRRRGGDDLVQDHFEWRKTVHSNPDVLSMSFFPIVGLLEPGSNVDNLNRAIDAYLTYKPPLEELQYFLEFQVPRAWAPVVNQVGPPRKEPVCPPLQFSLMGPKLFISTDQISVGRKPVTGLRLCLEGSKLNRLAVHVQHLTVLPKILQPHWDAYVAIGAPKWHGPEEQDSRWFEPVLWKNFAHVSTAPVEFNETWFGDASGAYIVTGAQLGVWDFGLKSVLHLKLLYSKVPGCTIRRSVWDHTPAPSGQQQQPKAKKGALSISSAAVPQTTQKLSKFVDTTELMRGPQDLPGHWLVTGAKLCVEKSNIFLRVKYSLLNY

SEQ ID NO: 862 - protein, 533 aa, Platycerium wandae
MANEDVSRGARATAINAVQAIGRGFDITCDIRLLYCKGTPGSRLVVIDDDHTADLQVADDLVIQNVSKDIKARIEKPSRAYQGILDFDQMSELFNKKLSIDGKVPSGMFNAMFNFSGSWQVDSSSTKSLATDGMHIPLYSVHLRPPFILCEEVKRAVPSTWDPPALASFIEKYGTHIIRSVEAGGKDIIYMKQHSSSILSKTEVETHLKKLVEARFQDLDLQSNDEELKLSNPQKHRSQLVHADGSSSLTGKEDITVIYRRRGGDDLVQDPREWKKTVKSNPDILTMSFFPIVLLLDPGPGREHLNRAMDAHLKYKPPLEELQYFLEFQVTRAWAPVANQVGLPRKEPVCPSLQFSLMGPKLYISTDQVSVGRKPVTGLRLCLEGSKLNRLAVYVEHLTVLPKILQPHWDAYVAIGAPKWHGPEEQDSRWFEPVLWKNFAHVSTAPVEFSETWFGDASGAYIVTGAQLGVWDFGVKSVLHLKLLYSKVPGCTIRRSVWDHTPIGQQVSKAKKGASSAAAAAAGVAAAARITLP

SEQ ID NO: 863 - protein, 291 aa, Campyloneurum angustifolium
MANEDASRGAQATAFNAVQALGRGFDVTCDIRLLYCKGSPGSRLVVIDDDHTADLEVADDLVIPNVSKDIKARREKPSRAYQGVQDFDQMSELFNKKLFLEGKVPSGMFNAMFNFSGSWQVDSSITKSLAIDGMHIPLYSVHLRTPFILCDEVKRAVPSTWDPSALASFIEKYGTHIIRSVEVGGKDIIYVKQHPLSSLTKPEVETHLKKLVETRFQNLDIQSNDEELTLLNPQKNRSQLVHADGSSSLTGKEVTILLLPYFTGANFCNIRQTAICCRISRLFIGDEGGMI

SEQ ID NO: 864 - protein, 556 aa, Hedera helix (Galaxy)
MEENAAALHTAMNSVQALGRGFDVNFDTRLLYCKGVAGSRIVEMDEEHTRDLCLYDGLVVPNVSKDVQNSQETIGRDGSGVCNYFEMMEYVNKKANLSENVPLGCFNAAFNFTSCKNIDAAATKTLCLDGFFIPLAKVQLVKSQLALQENVIRAVPASWDPPALASFIENFGTHVIVSVTIGGKDVIYVKQHQSSSLSKVEIKNYVQDIGNQRFSTTENHTTSGLLKYKDKDVTVIFRRRGGDDLEQSHPQWARTVRSSPDVIEMSFFPIIPLLEGVTGKEHLAQAIDLYLEYKPQIEELRYFLEFQVPRIWAPTQDRPLGYQRKEPVCPSLQFSMMGQKLYISQEQVSVGRKPVTGICLCLEGSKQNRLSIHLQHLACLPKILQPYWDTHVAIGAPKWQGPEEQDSRWFEPVKWKNFSHVSTAPIESPETFIGDQSGVYIVTGAQLGVWDFGSRNVLYMKLLFSRLPGCTIRRSLWDHKPNDKLKKLAATGNNCGDSSSGSGETLAGNKLAKFVDMSAMSKGPQDAPGHWLVAGGKLGVQKGKIVLRVKYSLLNY

SEQ ID NO: 865 - protein, 585 aa, Blechnum gibbum
MAEENASSRGARVTAVNAVQALGRGFDVTCDIRLLYCKGTPGSRLVVIDDDHTADLKLSDSLVIPNVSTDIKARLDKPSFPSPGVQDFDQMSELFNKKLAIGGKIPSGMFNAMFNFSGSWQVDSSMTKSLAFDGVVIPLYSVHLRAPFILCEEVKKAVPTTWDPAALASFIEKYGTHVIISVDVGGKDIIYVKQHQSSPLTKSEVDLHLKKLVETRFQGMESGVIQAKDKFQELALNPQKNRSQLVHADGSSSLTGKEDITVIYRRRGGDDLVQDHLEWKKTVHSNPDILSMAFFPIVLLLDAGSGREHLIRAIEAHLKYKPPLEELHYFLEFQVPRAWAPAANQVGLPRKEPVCPTLQFSLMGPKLFISTDQVSVGRKPVTGLRLCLEGSKLNRLAVHVQHLTVLPKILQPHWDAYVAIGAPKWHGPEEQDSRWFEPVLWKNFAHVSTAPVEFSETWFGDASGAYIVTGAQLGVWDFGLKSVLHLKLLYSKVPGCTIRRSVWDHTPTLLQQSKGKTGTSSASPAATAAAAAATQTTQKLSKFVDTTEMARGPQDLPGHWLVTGAKLCVEKSNIFLRVKYSLLNY

SEQ ID NO: 866 - protein, 553 aa, Equisetum
MASWELNIIYGSSVPWVWESIGGGIDTIHYMIKSWTDQEVDHCGLPCSKIRAGLYQMAQRFNKALSVNGKIPSGLFNAMFSFSGSWRADAHVTKSLALDGWFIMLYNLKLAQSSFKLRGEIKREVPSTWDPAALASFIERHGTHIVTSVTVGGKDAIYVKQHQSSSLTSMEIESYLKELGDRRFLARSKHSAFEMKEKGAGQSFPPPAQSLLPTSASDSSSSLTGKEDVTVIYRRRGGDDLVQNHEEWKYTIFSNPDVISMTFIPIASLLEGCPGKEHLIRAIDIYLEYKPPIEELQYFLEFQVAKVWAPVQNEGRLPRKEPVCPSLQFSLMGPKLYINTEQVSVGRRPVIGLRLCLEGSKVNRLSVHVLHLVALPKLLQPHWDSYVAIGPPKWHGPEEQDSRWFEPIQWKNFSHVSTAPIEYSEGWMGDDSGAHVVTGAQLGVWDFGPKSVLHLRLLYSKVPGCTIRRSIWDYNPNPSSFNPSINPSKASKEANASSSSNAPQVNKLAKFVDTEEMVKGPQDMPGHWLVTGAKLGVEKSKIFLRVKYSLLNY

SEQ ID NO: 867 - protein, 353 aa, Tupidanthus calyptratus
MEPRKNMSSDALNTTLWNSIQALGRGFDVTSDIRLLYCKGIPGSRLVQINDRDAKDLRVSDEFVVPNVSVDIECSKGEKITETTPVCSFHEMAIYFNEKSEISGDVPLGSFNAMFNLTGSWQLDAATTKSLAMIGSVIPLYKVELANLDLVLNEEVKRAVPYSWDPASLASFIENYGTHIVTSATVGGRDVVYIRQHQSSPLSVSDIENYVKDIADQRYSESRSHPSAAPLKYKDKDVTVIFRRRGGDDLEQSHIRWAETVQTSPDVINMTFIPIVSLLEGVPGIKHLACAIELYLEYKPPIEDLQYFLEFQIARVWAPEQSNIQRKDPVCPSLHFSLMGPKLYISPDQVLGT

SEQ ID NO: 868 - protein, 585 aa, Celosia argentea (Sylphid)
MDGNEAALQTAINAIQALGRGFDVNYDTRLLYCKGIAGSTIFQIDEESTWNLRLSNNLIVPNVPKSIKNEPCMPGRESFGVCSYDEMVKHFNKKADILADIPSGSFNSAFNFTGSKHIDAASTKSLAVDGFVIPLAKIQLTKSSWVLQENVIRAIPTSWDPPSLASFIENFGTHVITSVTIGGKDVIYVKQHQSSPLSAMEMKSYVQEIGNQRFMPKESHTSSGPIRVKEKVGDSGLFNSQGIYPQPTSVPSVNGKEDITVIFRRRGGDDLEHSHRQWAMTVKSSPDIIEMTFVPITDLIKDSARKEYLSRAINLYLEYKPAIEELRYFLEFQIPRVWAPVHNRLLRHQRKEPVCPSLQFSLMGQKLYISQEQVSVGRKPVTGLRLFLEGAKQNRLCIHLQHLASLPKILVPCWDTHVAIGAPKWMGPEEQDSRWFEPVKWKNFSHVSTAPIESHESYAGDVSGVHIVTGAQLGVWDFGSRNVLYMKLLYSRLPGCTIRRSLWDHTPIEKPWKAGGSAESTSGDSSSGGLSESVSSGNKLAKFVDMSEVTKGPEDLPGHWLVTGGKLGIEKGKIVLRVKYSLLNY

SEQ ID NO: 869 - protein, 577 aa, Asplenium australasicum
MADEDSSLRGAFATAVNAVQALGRGFDVTCDIRLLYCKGALGSRLVVIDDDHTADLKLSDGLVIPNVSMDIRARLEKPSCPSLGVQGFDEMSEEFNKKLFIGGDIPSGMFNAMFNFSGSWQVDSSMTKSLAIDGLVLPLYSVHLRSPFILCEEVKNAVPNTWDPAALASFIEKYGTHIIRSVEVGGKDTIYVKQHPSSTLTKEEVESHLTKLVESRFQGRESDVIRRKDKENTDSSSSLTGKEDITVIYRRRGGDDLVQDHVDWKKTVNFNPDILSMAFFPIVLLLDAGSGREHLNRAIEAHLKYKPPLEELHYFLEFHVARAWAPLANPVGPPRKEPICPALQFSLMGPKLFINTSQVSVGRKPVTGLRLCLEGSKLNRLAVHVQHLTVLPKILQPHWDAYVAIGAPKWHGPEEQDSRWFEPVLWKNFAHVSTAPVEFSETWFGDASGAYIVTGAQLGVWDFGLKSVLHLKLLYSKVPGCTIRRSVWDHTPTGQQQSKGTKGTSSASPAAGTAAAPAAAAAAAATPATQKLSKFVDMSEMARGPQDLPGHWLVTGAKLCVGKSNIFLRVKYSLLNY

SEQ ID NO: 870 - protein, 580 aa, Ophioglossum pendulum
MEDDDSALKVSIAVNALQTLGRGFDLTCDIRIIYCKGTEGSRLLEIDEEHTKNLELPGGISIPDVSRDIKCVQGTEKHFSTGVLHFEQMAGYFNEVLSLSGKTASGVFNAVFNFSGSWNSDALATKSLAVDGWSIILYSLSLTRAPLTLIHEVKAAVPYTWDPAALASFIEKYGTHIVTSVSVGGKDAIYVKQHQSSTLTSTDVELHLKELRSIRFSPYGGHISFLGNEKVADQMLFSTQQILPQPCNSNGSSSFAGKEDITVIYRRRGGNDLVKGHDEWKKTVPTNPDVVTMTFIPITSLLEDGPCKDHLNRAILVYLEYKPPIEELQYFLAFQVARVWAPVQNELGPPRREPVCPALQFSLMGPKLYISTEQVSVGRRPVTGLRLSLEGRNCNRLAVHVQHLTSLPKVLQPHWDAYIAIGAPKWHGPEEQDSRWFEPVLWRNFSHISTAPVEFNETWIGDASGAFVVTGAQLGVWDFGLKSVLYLRLLYSKVPGCTIRRSVWDHTPVPLSQHLKVKTSSKTSVSTATSETPKLLKFVDTTEMSRGPQDMPGHWMVTGAKLGVEKSKIFLRVKYSLLNY

SEQ ID NO: 871 - protein, 317 aa, Equisetum
MASWELNIIYGSSVPWVWESIGGGIDTIHYMIKSWTDQEVDHCGLPCSKIRAGLYQMAQRFNKALSVNGKIPSGLFNAMFSFSGSWRADAHVTKSLALDGWFIMLYNLKLAQSSFKLRGEIKREVPSTWDPAALASFIERHGTHIVTSVTVGGKDAIYVKQHQSSSLTSMEIESYLKELGDRRFLARSKHSAFEMKEKGAGQSFPPPAQSLLPTSASDSSSSLTGKEDVTVIYRRRGGDDLVQNHEEWKYTIFSNPDVISMTFIPIASLLEGCPGKEHLIRAIDIYLECIFFFQCLKNQDIIPGVGTMIVYIVVKFG

SEQ ID NO: 872 - protein, 537 aa, Asplenium nidus var plicatum
MADEDSSLRGAFATAVNAVQALGRGFDVTCDIRLLYCKGTPGSRLVVIDDDHTADLKLSDGLVIPNVSMDIRARLEKPYRPSLGVQDFHKMSEEFNKKLFIGGDIPSGMFNAMFNFSGSWQVDSSMTKSLAIDGLVLPLYSVHLRSPFILCEEVKNAVPNTWDPAALASFIEKYGTHIIRSVEIGGKDIIYVKQHPSSTLTKHEVESHLKKLVESRFQGRESDVIRRKDKENTDSSSSLTGKEDITVIYRRRGGDDLVQDHVEWKKTVNFNPDILSMAFFPIVLLLDAGSGREHLNRAIEAHLKYKPPLEELHYFLEFQLTRAWAPLVNPAGPPRKEPVCPALQFSLMGPKLFINTSQVSVGRKPVTGLRLSLEGSKLNRLAVHVQHLAVLPKILQPHWDAYVAIGAPKWHGPEEQDSRWFEPVLWKNFAHVSTAPVEFSETWFGDASGAYIVTGAQLGVWDFGLKSVLHLKLLYSKVPGCTIRRSVWDHTPTGQQQSKGTKGTSSASPAAGTAAALVACCCCCCCDTGHPETLQVC

SEQ ID NO: 873 - protein, 266 aa, Waldsteinia ternata
MATRSSSSEALRTTLSNTIQALGRGFDVTSDIRLLYCKGAPGSRLVNLNETEAKDLAVSDGVVVPNVPADIQCSSGSRNTERVSVCSFHEMAEYFNKKSGISSRIPLGSFNAMFNFTGSWKVDASATKSLALVGYCIPLYKVDLGAENLVLHDEIKRAVPYTWDPAALASFIENYGTHIVTSATIGGRDVVYIRQHHSSPLSTSDIQSYVKDIGDDRFGDTKGQSSAGPLKYKDKDVTVIFRRRGGDDLEQSHSRSAWNKAFEPCN

SEQ ID NO: 874 - protein, 558 aa, Vernonia noveboracensis
MKDNYYSSMEEDPSSKNNALTTTIKNSIQALGRGFDVTSDIRLLYCKGAPGSRLIYLDDEHTKDLVFSDDGVVTIPNVSVDVEFSKGESTTEATPVWTFHEMAKHFNMKSNLCGDVPLGSFNAMFNFTGSWQLDAASTKSLAMIGYIVPLYEIRLENSDLVLLQEVKRAVPYSWDPSSLASFIENYGTHIVTSVTIGGRDVVYIKQHQSSPLSLSDIDNYVKDIGENRFVDLKSQSSSGPLKYKDKDVTVIFRRRGGDDLEQSHAKWAETVETAPDVINMTFTPIVSLLDGIPGINHLSRAIDLYLEYKPPIEDLQYFLDFRIPRVWAPEQSNIQRKEPVCPSLQFSLMGPKLYISLEQVTVGRKPVTGLRLSLEGSKQNRLAVHLQHLVSLPKILQPHWDAHMAIGAPKWQGPEEQDSRWFEPIKWKNFSHVSTAPIEHTETHIGDLSGVHIVTGAQFGVWNFGARSVLHLKLLFSKVPGCTIRRSVWDHSPSNLPKLGDDKGDGSSQSGKLAKIVDMTEMSKGPQDVPGHWLVTGAKLGVDKGKIVLRIKYSLLNY

SEQ ID NO: 875 - protein, 585 aa, Phormium (Lancer Terra Cotta)
MEENAALRTIRSSIQALGRGFDVNYDTRLLYCKGVGGSRVVEVDEEHTRDVLAFEGLIVPGVSRDVRCFQEGRSRQSTGVCTYTEMIEYFNRKALLPGNVPLGSFNSVFCFSGSRKIDAAATRSLAMDGIFIPLCKVQLIKQPSSLQEDVRRAVPLTWEPSSLARFIENYGTHVITSITVGGKDEIYVKQHSSSPLSTIEIKNYIQDIGDQRFSDSESHTSSGPMKLKDKAADPFSFNSQGVYPQPPTAPYLNSKEDVTVIFRRRGGDDLVQSHYHWAKTVSFAPDVIQMTFLPITSLLDGIPWKDHLIRAITLYLEYKPPIEELRYFLEFQIPLIWAPVRENLPGHQRKDPVCPHLQFSMMGQKLYVSQEQVSVGRKPVTGLRLCLEGEKQNRLCIQVQHLASLPKILQPYWNSHIAIGALKWHGPEEQDSRWFEPVKWKNFSHVSTAPIENSENFIRDPSGVGVHIVTGAQLGVWDFGTKNVLYMKLLYSKVPGCTVRRSLWDHNPACSSEKSKKSSIGPSMTPGDSSSGSRDVAGKLLKLVDMSEMVKGPDDSPGHWLVTGGKLGVEKGKIVLRVKYSLLNY

SEQ ID NO: 876 - protein, 570 aa, Asplenium australasicum
MADEDASSRGAFVTAVNAVQALGRGFDVTCDIRLLYCKGTPGSRLVVIDDDHNTDLRVSDGVVIPNVSPDIRARLEKPYRPSLGVQDFHKMSEEFNKKLFIGGDIPSGMFNAMFNFSGSWQVDSSMTKSLAIDGLVLPLYSVHLRSPFILCEEVKNAVPNTWDPAALASFIEKYGTHIIRSVEVGGKDTIYVKQHPSSTLTKEEVESHLTKLVESRFQGRESDVIRRKDKENTDSSSSLTGKEDITVIYRRRGGDDLVQDHVDWKKTVNFNPDILSMAFFPIVLLLDPGTGREHLNRAIEAHLKYKPPLEELHYLLEFHVTRAWAPLANPAGPSRKEPVCPALQFSLMGPKLFINMSQVSVGRKPVTGLRLCLEGSKLNRLAVHVQHLTVLPKILQPHWDAYVAIGAPKWHGPEEQDSRWFEPVLWKNFAHVSTAPVEFSETWFGDASGAYIVTGAQLGVWDFGLKSVLHLKLLYSKVPGCTIRRSVWDHAPIGGQQQSKAKGASSASPAALDAAAAATQATQKLSKFVDTSEMARGPQDLPGHWLVTGAKLCVEKSNIFLRVKYSLLNY

SEQ ID NO: 877 - protein, 368 aa, Tupidanthus calyptratus
MEPRKNMSSDALNTTLWNSIQALGRGFDVTSDIRLLYCKGIPGSRLVQINDGVTKDLAVSDGFVVPNVSVDIESSRGEEVTETTAVCSFHEMAIYFNEKSEISGHVPLGSFNAMFNLTGSWQLDAATTKSLAMIGSVIPLYKVELANLDLVLNEEVKRAVPYSWDPASLASFIENYGTHIVTSATVGGRDVVYIRQHQSSPLSVSDIENYVKDIADQRYSGSRSNPSAAPLKYKDKDVTVIFRRRGGDDLEQSHVRWAETVQTSPDVINMTFIPIVSLLEGVPGIKHLARAIELYLEYKPPIEDLQYFLEFQIARVWAPEQSNIQRKDPVCPSLHFSLMGPKLYISPDQVPCLVFNTLLLNCCYEPMV

SEQ ID NO: 878 - protein, 582 aa, Sphaeropteris cooperi
MAEDDALLRGARGIALNAVQALGRGFDVTFDIRLLYCKGAPGTRLVKIDEELCGNLELSDGLCIPNVSLGIKASLGKCTRHCLGVLDFDQMSETFNKQLCIPGKTPLGMFNAMFSFSGSSQIDASMTKSLAVDGWVIPLYSVHLRAPFMLCEEVRKAVPTTWDPSALASFIEKYGTHIIIGVEVGGKDVIYVKQHQSSILTKSEIELHLKRLVETRFQGVENSVFKAEDKLQELAMFTTQKIRSQPLHADGSSSLTGKEDITVIYRRRGGDDLVQDHFEWRKTVHSNPDVLSMSFFPIVGLLEPGSNVDNLNRAIDAYLTYKPPLEELQYFLEFQVPRAWAPVVNQVGPPRKEPVCPPLQFSLMGPKLFISTDQISVGRKPVTGLRLCLEGSKLNRLAVHVQHLTVLPKILQPHWDAYVAIGAPKWHGPEEQDSRWFEPVLWKNFAHVSTAPVEFSETWFGDATGAYIVTGAQLGVWDFGPKSVLYMKLLYSKVPGCTIRRSVWDHTPAPSGQQQLKAQKGAPSTGPSSARQSTHKLSKFVDTTDLMRGPEDLPGHWLVTGAKLCVEKSNIFLRVKYSLLNY

SEQ ID NO: 879 - protein, 476 aa, Blechnum gibbum
MAEENASSRGARVTAVNAVQALGRGFDVTCDIRLLYCKGTPGSRLVVIDDDHTADLKLSDSLVIPNVSTDIKARLDKPSFPSPGVQDFDQMSELFNKKLAIGGKIPSGMFNAMFNFSGSWQVDSSMTKSLAFDGVVIPLYSVHLRAPFILCEEVKKAVPTTWDPAALASFIEKYGTHVIISVDVGGKDIIYVKQHQSSPLTKSEVDLHLKKLVETRFQGMESGVIQAKDKFQELALNPQKNRSQLVHADGSSSLTGKEDITVIYRRRGGDDLVQDHLEWKKTVHSNPDILSMAFFPIVLLLDAGSGREHLIRAIEAHLKYKPPLEELHYFLEFQVPRAWAPAANQVGLPRKEPVCPTLQFSLMGPKLFISTDQVSVGRKPVTGLRLCLEGSKLNRLAVHVQHLTVLPKILQPHWDAYVAIGAPKWHGPEEQDSRWFEPVLWKNFAHVSTAPVDITTPLGCVCGYRGTQVAWTRRAR

SEQ ID NO: 880 - protein, 547 aa, Verbascum chaixii (Vill)
MALPSENALITTLGNSIQALGRGFDVTSDIRLLYCKGAPGSRLVHINEEQTRNLEISGSYAIPNVSVDIECSQGQSFNNKTPVWSFHEMAKYFNEKSGLPGNIPLGCFNAMFNFSGSRQLDAAATKSLAMVGYIIPLFTVKLAKPDLILHDQIKRAVPYSWDPASLASFIENYGTHIVTSATIGGRDVVYIRQHQSSPLSTSDIENYVKDIGDQRFSDSKGNSSAGSLKYKDKDVTVIFRRRGGDDLEQSYEKWAKSVEGAPDVISMTFTPIVSLLEGVPGIKHLARAIELYLEYKPPIEDLQYFLDFQISRAWAPEQNNNLQRKEPVCSSLQFSLMGAKLYISPDQVTVGRKPVTGLKLSLEGIKQNRLAINLQHLVSLPKILQPHWGPHMAIGAPRWQGPEEQDSRWFEPIKWKNFSHVSTSPIEYTDTCIGDLSGVHIVTGAQLGVWDFGARSVLHLKLLFSKVPGCTIRRSVWDHSPSNLQNPEGSSSSNESSQVGKLAKIVDMSEMSKGPQDMPGHWLVTGAKLGVDKGRIVLRVKYSLLNY

SEQ ID NO: 881 - protein, 573 aa, Davallia fejeensis
MASEDASLPGARATALNAVQALGRGFDVTCDIRLLYCKGTPGSRLVVVDDHTTDLKVANGLVIHNVSKDIKARLEKPSRAYQGVQDFDQMSELFNKKLFIEGKIPSGMFNAMFNFSGSWQVVAIDGMHIPLYSVHLRSPFILCDEVKRAVPSTWDPPALASFIEKYGTHIIRSVEVGGKDIIYVKQHPSSNLTKSEVETHLKKLVETRFQGMESGLVHQKDEKNRSQLVHADGSSSLTGKEDITVIYRRRGGDDLVQDPLEWKKTVNSNPDILTMAFFPIVLLLDPGPGREHLHRAIEAHLKYKPPLEELQYFLEFQVTRAWAPLSNQVGLPRKEPVCPSLQFSLMGPKLFISTDQVSVGRKPVTGLRLCLEGSKLNRLAVHVEHLTVLPKILQPHWDAYVAIGAPKWHGPEEQDSRWFEPVLWKNFAHVSTAPVEFSETWFGDASGAYIVTGAQLGVWDFGVKSVLHLKLLYSKVPRCTIRRSVWDHTPIGQQLSKAKKGASSTAAAAVAAAASIGAAATSQAMQKLSKFVDTTEMSRGPQDLPGHWLVTGAKLCVEKSNIFLRVKYSLLNY

SEQ ID NO: 882 - protein, 471 aa, Pandorea pandorana (Golden Showers)
MDSSPKKDLSSGGGFTVSENALIITLLNSIQALGRGFDVTSDIRLLYCKGTPGSRLVNIDEGQTRNLEISESYAIPDVSVDIECSRGKSSSEKTPVWSFHEMAKYFNEKSSVPGNIPLGSFNAMFNFSGSWQLDAAATKSLAMVGYVIPLFRVKLANPNLALRDEIKRAVPYSWDPASLASFIENYGTHIVTSATIGGRDVGYIRQHQSSPLSISDIENYVKDIGDQRFSDSKTNTSAGALKYKDKDVTVIFRRRGGDDLEQSYAKWATTVEGAPDVINMTFTPIVSLLEGVAGIKHLTRAIELYLEYKPPIEDLQYFLDFQISRVWAPEQNNLQRREPVCSSLQFSLMGPKLYISPDQVTVGRKPVTGLKLSLEGIKQNRLAINLQHLVSLPKILQPHWDAHMAIGAPRWQGPEEQDSRWFEPIKWKHFSHVSTAPIEYTDTCIGDLSGVHIVTGAQLGVWDFGAKIPNA

SEQ ID NO: 883 - protein, 582 aa, Campyloneurum angustifolium
MANEDASRGAQATAFNAVQALGRGFDVTCDIRLLYCKGSPGSRLVVIDDDHTADLEVADDLVIPNVSKDIKARREKPSRAYQGVQDFDQMSELFNKKLFLEGKVPSGMFNAMFNFSGSWQVDSSITKSLAIDGMHIPLYSVHLRTPFILCDEVKRAVPSTWDPSALASFIEKYGTHIIRSVEVGGKDIIYVKQHPLSSLTKPEVETHLKKLVETRFQNLDIQSNDEELTLLNPQKNRSQLVHADGSSSLTGKEDITVIYRRRGGDDLVQDPRDWKKTVKSNPDILTMTFFPIVLLLDSGPGKEHLIRAIDAHLKYKPPLEELQYFLEFQVTRAWAPLANQVGISRKEPVCPSLQFSLMGPKLYISTDQVSVGRKPVTGLRLCLEGSKLNRLAVHVEHLTVLPKILQPHWDAYVAIGAPKWHGPEEQDSRWFEPVLWKNFAHVSTAPVEFSETWFGDASGAYIVTGAQLGVWDFGLKSVLHLKLLYSKVPGCTIRRSVWDHTPIGQHVSKAKKGASSVGAAAVAISAATSTTQTMQKLSKFVDTTEMSRGPQDLPGHWLVTGAKLCVEKGNIFLRVKYSLLNY

SEQ ID NO: 884 - protein, 620 aa, Nephrolepis cordifolia (Duffii)
MADEDASFRGARATAVNAVQALGRGFDVTCDIRLLYCKGTPGSRLVVIDDDSTADLKVADGLAIPNVSTDIRTRLERPSRASQGVQDFDQMSELFNKKLCIGGKIPSGMFNAMFNFSGSWQVDSSITKSLAVDGVLIPLYSVHLRAPFILSEEVKRAVPSTWDPPALASFIEKYGTHIIISVEVGGKDIIYVKQHPSSGLTKPEVDAHLKKLVETRFLGMESGVNQAKEKDLALLNPQKNRSHLVHADGSSSLTGKEDITVIYRRRGGDDLVQDHLEWKKTVNSNPDILSMAFFPIVLLLDASPGREHLNRAIEAHLKYKPPLEELQYFLEFQVTRAWAPVANQVGIPRKEPVCPSLQFSLMGPKLFISTDQVSVGRKPVTGLRLCLEGSKLNRLAVHVEHLTVLPKILQPHWDAYVAIGAPKWHGPEEQDSRWFEPVLWKNFAHVSTAPVEFSETWGPEEQDSRWFEPVLWKNFAHVSTAPVEFSETWFGDASGAYIVTGAQLGVWDFGLKSVLHLKLLYSKVPGCTIRRSVWDHTPVGQQLNKAKKGASGASATAAATTTAASAVTTQTTQKLSKFVDTTEMSRGPQDLPGHWLVTGAKLCVEKSNIFLRVKYSLLNY

SEQ ID NO: 885 - protein, 587 aa, Platycerium bifurcatum var bifurcatum
MANEDVSRGARATAINAVQAIGRGFDITCDIRLLYCKGTPGSRLVVIDDDHTADLQVADDLVIQNVSKDIKARIEKPSRAYQGILDFDQMSELFNKKLSIDGKVPSGMFNAMFNFSGSWQVDSPSTKSLATDGMHIPLYSVHLRPPFILCEEVKRAVPSTWDPPALASFIEKYGTHIIRSVEAGGKDIIYMKQHSSSILSKTEVETHLKKLVEARFQDLDLQSNDEELKLSNPQKHRSQLVHADGSSSLTGKEDITVIYRRRGGDDLVQDPREWKKTVKSNPDILTMSFFPIVLLLDPGPGREHLNRAIDAHLKYKPPLEELQYFLEFQVTRAWAPVANQVGLPRKEPVCPSLQFSLMGPKLYISTDQVSVGRKPVTGLRLCLEGSKLNRLAVYVEHLTVLPKILQPHWDAYVAIGAPKWHGPEEQDSRWFEPVLWKNFAHVSTAPVEFSETWFGDASGAYIVTGAQLGVWDFGVKSVLHLKLLYSKVPGCTIRRSVWDHTPIGQQVSKAKKGASSAAAAAAGVAAAAIGAAASSTQAMQKLSKLIDTTEMSRGPQDLPGHWLVTGAKLCVEKGNIFLRVKYSLLNY

SEQ ID NO: 886 - protein, 302 aa, Verbascum chaixii (Vill)
MASMGSENALITTLCNSIQALGRGFDVTSDIRLLYCKGAPGSRLVHINEEQTRNLEISGSYAIPNVSVDIECSQGQSFNNKTPVWSFHEMAKYFNEKSGLPGNIPLGCFNAMFNFSGSRQLDAAATKSLAMVGYVIPLYMVKLAKPNLILRDEIKRAVPYSWDPASLASFIENYGTHIVTSATIGGRDVVYIRQHQSSPLSASDIENYVKDIGDQRFSDSKGNSSAGALKYKDKDVTVIFRRRGGDDLEQSYAKWAKTVEGAPDVITMTFTPIVSLLEGVAGIKHLARAIELYLECKNLILC

SEQ ID NO: 887 - protein, 577 aa, Asplenium australasicum
MADEDASSRGAFVTAVNAVQALGRGFDVTCDIRLLYCKGTPGSRLVVIDDDHNTDLRVSDGVVIPNVSPDIRARLEKPYRPSLGVQDFHKMSEEFNKKLFIGGDIPSGMFNAMFNFSGSWQVDSSMTKSLAIDGLVLPLYSVHLRSPFILCEEVKNAVPNTWDPAALASFIEKYGTHIIRSVEIGGKDIIYVKQHPSSTLTKHEVESHLKKLVESRFQATESDVIWRKDKENSESSSSLTGKEDITVIYRRRGGDDLVQDHVEWKKTVNSNPDILSMAFFPIVLLLDAGSGREHLNRAIEAHLKYKPPLEELHYFLEFHVARAWAPLANPVGPPRKEPICPALQFSLMGPKLFINTSQVSVGRKPVTGLRLCLEGSKLNRLAVHVQHLTVLPKILQPHWDAYVAIGAPKWHGPEEQDSRWFEPVLWKNFAHVSTAPVEFSETWFGDASGAYIVTGAQLGVWDFGLKSVLHLKLLYSKVPGCTIRRSVWDHTPTGQQQSKGTKGTSSASPAAGTAAAPAAAAAAAATPATQKLSKFVDMSEMARGPQDLPGHWLVTGAKLCVGKSNIFLRVKYSLLNY

SEQ ID NO: 888 - protein, 548 aa, Verbascum chaixii (Vill)
MASMGSENALITTLCNSIQALGRGFDVTSDIRLLYCKGAPGSRLVHINEEQTRNLEISGSYAIPNVSVDIECSQGQSFNNKTPVWSFHEMAKYFNEKSGLPGNIPLGCFNAMFNFSGSRQLDAAATKSLAMVGYVIPLYMVKLAKPNLILRDEIKRAVPYSWDPASLASFIENYGTHIVTSATIGGRDVVYIRQHQSSPLSASDIENYVKDIGDQRFSDSKGNSSAGALKYKDKDVTVIFRRRGGDDLEQSYAKWAKTVEGAPDVITMTFTPIVSLLEGVAGIKHLARAIELYLEYKPPIEDLQYFLDFQISRAWAPEQNNNLQRKEPVCSSLQFSLMGPKLYISPDQVTVGRKPVTGLKLSLEGLKQNRLAINLQHLVSLPKILQPHWDTHIAIGAPRWQGPEEQDSRWFEPIKWKNFSHVSTSPIECTDTCIGDLSGVHIVTGAQLGVWDFGARSVLHLKLLFSKVPGCTIRRSVWDHSPSNLQKGDGSSSSNESSQMGKLAKIVDMTEMSKGPQDMPGHWLVTGAKLGVDKGKIVLRVKYSLLNY

SEQ ID NO: 889 - protein, 584 aa, Adonis amurensis (Kinsekai)
MEENAAAEAAAFHTVVNSVQALGRGFDVNFDTRLLYCKGVAGARIVQVDGEHTRDLLACDGMVVPNVSRDIKFSQETIGRESKGICPFQEMVGYFNKKADLSGDVPLGSFNSAFSFTGSKKVDAAATKSLSLDGFFVPLCKVEFVNKPSVLQEHVKQAIPSSWDPLALSSFIENFGTHVITSVTVGGKDVIYVKQHNSSPLSTMEIKKYVQDIGDQRFSNTENHASSGPMKFNDKAADPCLFNNQGVYPQPQSSAPYLTGKEDVTVIFRRRGGDDLVQSHIQWVRTVRASPDVIEMTFIPITDLVDSRPCKDHLSRAITLYLEHKPPVEELRYFLEFQIPRVWAPVEDKFLGHQRKEPVCPSLQFSIMGQKLYVSQEQVSVGRKPVTGLRLTLEGAKQNRLHIQLEHLSSLPKILCPYWDTTVAIGAPKWQGTEEQDSRWFEPVKWKNFSHVSTAPIENNETFIGDLSGVHIVTGAQLGVWDFGSRNVLHMKLLYSRLPGCTIRRSLWDHSPPINSKVGGGGGATTNVMNSGSGSSNKLCKIIDTSEMKKGPEDSPGHWLVTGGKLGVEKGRIVLRVKYSVLNY

SEQ ID NO: 890 - protein, 288 aa, Equisetum
MASWELNIIYGSSVPWVWESIGGGIDTIHYMIKSWTDQEVDHCGLPCSKIRAGLYQMAQRFNKALSVNGKIPSGLFNAMFSFSGSWRADAHVTKSLALDGWFIMLYNLKLAQSSFKLRGEIKREVPSTWDPAALASFIERHGTHIVTSVTVGGKDAIYVKQHQSSSLTSMEIESYLKELGDRRFLARSKHSAFEMKEKGAGQSFPPPAQSLLPTSASDSSSSLTGKEDVTVIYRRRGGDDLVQNHEEWKYTIFSNPDVISMTFIPIASLLEGCPGKEHLIRAIDIYLE

SEQ ID NO: 891 - protein, 583 aa, Ophioglossum pendulum
MEEDDNDSALKASIVVNALQTLGRGFDLTCDIRIIYCKGTERSRLIEIDEEHTKTLEVPGGISIPNVSRDIKCVQGTEEHFSTGVLDFEQMAGYFNEVLSLSGKTASGVFNAVFNFSGSWNSDALATKSLAVDGWSIILYSLSLTRAPLTLIHEVKAAVPYTWDPAALASFIEKYGTHIVTSVSVGGKDAIYVKQHQSSTLTSTDVELHLKELRSIRFSPYGGHISFLGNEKVADQMLFSTQQILPQPCNSNGSSSFAGKEDITVIYRRRGGNDLVQGHDEWKKTVPTNPDVVTMTFVPITSLLENGPRSDHLSRAILVYLEYKPPIEELQYFLAFQVARVWAPVQNELGPPRREPVCPALQFSLMGPKLYISTEQVSVGRRPVTGLRLSLEGRNCNRLAVHVQHLTSLPKVLQPHWDAYIAIGAPKWHGPEEQDSRWFEPVLWRNFSHISTAPVEFNETWIGDASGAFVVTGAQLGVWDFGLKSVLYLRLLYSKVPGCTIRRSVWDHTPVSLNQNLKMDSSKVLNTVPTATSQTPKLLKFVDTTEMSRGAQDMPGHWLVTGAKLGVDKSKIFLRVRYSLLNY

SEQ ID NO: 892 - protein, 345 aa, Equisetum
MAEDEPSCTLATSVIQALGQGFDITSDIRLSYCKGSRLVQIDTEQTSDLVLPGVTASIPQVPTEIKCLPGRIMRHGTGVLDFEKMAQRFNKALSVNGKIPSGLFNAMFSFSGSWRADAHVTKSLALDGWFIMLYNLKLAQSSFKLRGEIKREVPSTWDPAALASFIERHGTHIVTSVTVGGKDAIYVKQHQSSSLTSMEIESYLKELGDRRFLARSKHSAFEMKEKGAGQSFPPPAQSLLPTSASDSSSSLTGKEDVTVIYRRRGGDDLVQNHEEWKYTIFSNPDVISMTFIPIASLLEGCPGKEHLIRAIDIYLECIFFFQCLKNQDIIPGVGTMIVYIVVKFG

SEQ ID NO: 893 - protein, 281 aa, Tupidanthus calyptratus
MSPLILGFFIAREFLGDSTVFSLSSTKDPSFMEPRKNMSSDALNTTLWNSIQALGRGFDVTSDIRLLYCKGIPGSRLVQINDRDAKDLRVSDEFVVPNVSVDIECSKGEKITETTPVCSFHEMAIYFNEKSEISGHVPLGSFNAMFNLTGSWQLDAATTKSLAMIGSVIPLYKVELANLDLVLNEEVKRAVPYSWDPASLASFIENYGTHIVTSATVGGRDVVYIRQHQSSPLSVSDIENYVKDIADQRYSGSRSNPSAAPLKYKDKVSFPLKKYLKIDSP

SEQ ID NO: 894 - protein, 572 aa, Asplenium nidus var plicatum
MADEDSSLRGAFATAVNAVQALGRGFDVTCDIRLLYCKGTPGSRLVVIDDDHTADLKLSDGLVIPNVSMDIRARLEKPYRPSLGVQDFHKMSEEFNKKLFIGGDIPSGMFNAMFNFSGSWQVDSSMTKSLAIDGLVLPLYSVHLRSPFILCEEVKNAVPNTWDPAALASFIEKYGTHIIRSVEIGGKDIIYVKQHPSSTLTKHEVESHLKKLVESRFQGRESDVIRRKDKENTDSSSSLTGKEDITVIYRRRGGDDLVQDHVEWKKTVNFNPDILSMAFFPIVLLLDAGSGREHLNRAIEAHLKYKPPLEELHYFLEFQLTRAWAPLVNPAGPPRKEPVCPALQFSLMGPKLFINTSQVSVGRKPVTGLRLSLEGSKLNRLAVHVQHLAVLPKILQPHWDAYVAIGAPKWHGPEEQDSRWFEPVLWKNFAHVSTAPVEFSETWFGDASGAFIVTGAQLGVWDFGLKSVLHLKLLYSKVPGCTIRRSVWDHAPIGGQQQGKAKGASSASPAAPDAAAAAAATQATQKLSKFVDTSEMARGPQDLPGHWLVTGAKLCVGKSKIFLRVKYSLLNY

SEQ ID NO: 895 - protein, 358 aa, Waldsteinia ternata
MATRSSSSEALRTTLSNTIQALGRGFDVTSDIRLLYCKGAPGSRLVNLNETEAKDLAVSDGVVVPNVPADIQCSSGSRNTERVSVCSFHEMAEYFNKKSGISSRIPLGSFNAMFNFTGSWKVDASATKSLALVGYCIPLYKVDLGAENLVLHDEIKRAVPYTWDPAALASFIENYGTHIVTSATIGGRDVVYIRQHHSSPLSTSDIQSYVKDIGDDRFGDTKGQSSAGPLKYKDKDVTVIFRRRGGDDLEQSHSRWAETVQLAPDVINMTFTPIVSLLEGVPGIKHLSRAIELYLECKTQSRNSSFLIIVSVSLKNKLKTRSDIEVYSLQFYRFKSYKIPKFLLDKLTDSFIYDPIRT

SEQ ID NO: 896 - protein, 587 aa, Microsorum punctatum (Serratum)
MANEDASRGARATALNAVQAIGRGFDVTCDIRLLYCKGTPGSRLVVIDDDHTADLEVADDLVIQNVSKDIKARIEKPARAYQGVQDFDQMSELFNKKLSIDGKVPSGMFNAMFNFSGSWQVDSSITKSLAIDGMHIPLYSVHLRPPFILCEEVKRAVPSTWDPPALASFIEKYGTHIIRSVEVGGKDIIYMKQHSSSTLSKAEVETHLKKLVETRFQDLDNQLNDEELTSSNPQKYRSQLVHADSSSSLTGKEDITVIYRRRGGDDLVQDPREWKKTVKSNPDILTMSFFPIVLLMDAGPNREHLIRAIDAHLKYKPPLEELQYFLEFQVTRAWAPVANQVGVPRKEPVCPSLQFSLMGPKLYISTDQVSVGRKPVTGLRLCLEGSKLNRLAVHVEHLTVLPKILQPHWDAYVAIGAPKWHGPEEQDSRWFEPVLWKNFAHVSTAPVEFSETWFGDASGAYIVTGAQLGVWDFGVKSVLHLKLLYSKVPGCTIRRSVWDHTPIGQQVSKAKKGASSAAAAAAGVAAAAIGAATSTTQTMQKLSKLIDTTEMSRGPQDLPGHWLVTGAKLCVEKGNIFLRVKYSLLNY

SEQ ID NO: 897 - protein, 449 aa, Phormium (Lancer Terra Cotta)
MEKNKNEKAAALIATLWNSVQALGRGFDVTADTRLLYCKGAAGSRFVQIGEGQIRDFVVTEGGAVLRDVPVDVEISRERRVRDTTRVCSFREMAEYFNKKSGLFETVPLGSFNSMFSLTGSWKIDAAATKTLAMDGYFIPLFKVKLTDPALILREDIKRAVPRSWDPPSLANFIENFGTHIITSVKIGGKDVVYIKQHHSSLLSTSDIEKYLTEIGDQRFSDLENQFADALLLNNRDGRPQLSSVPHLSGKEDVTVIFRRRGGDDLVQNHAEWAATVSSAPDVINMTFIPIVSLLEGLPGIQYLARAIDLYLDYKPPIEELQYFLEFQIQRVWPPAPSNIPGHQRKEPVCPFLQFSLMGPKLYISSEQISVGRKPVTGLRLCLEGIKQDRLAIHLQHLASLPKILRPHWDSHIAIGAPKWQGPEEQDSRWFEPIKWKNFAHLLMSVRHQ

SEQ ID NO: 898 - protein, 553 aa, Asplenium nidus var plicatum
MTDEDASSRGAFVTAVNAVQALGRGFDVTCDIRLLYCKGTPGSRLVVIDDDHNTDLRVSDGVVIPNVSPDIRARLEKPYRPSLGVQDFHKMSEEFNKKLFIGGDIPSGMFNAMFNFSGSWQVDSSMTKSLAIDGLVLPLYSVHLRSPFILCEEVKNAVPNTWDPAALASFIEKYGTHIIRSVEIGGKDIIYVKQHPSSTLTKHEVESHLKKLVESRFQAMESDVIRRKDKENSESSSSLTGKEDITVIYRRRGGDDLVQDHVEWKKTVNSNPDILSMAFFPIVLLLDAGSGREHLNRAIEAHLKYKPPLEELHYFLEFHVARAWAPLANPVGPPRKEPICPALQFSLMGPKLFINTSQVSVGRKPVTGLRLSLEGSKLNRLAVHVQHLAVLPKILQPHWDAYVAIGAPKWHGPEEQDSRWFEPVLWKNFAHVSTAPVEFSETWFGDASGAYIVTGAQLGVWDFGLKSVLHLKLLYSKVPGCTIRRSVWDHTPTGQQQSKGTKGTSSASPAAGTAAALVALLLLLLVALLLLLLVACCCCCCCDTGHPETLQVC

SEQ ID NO: 899 - protein, 556 aa, Waldsteinia ternata
MATRSSSSEALRTTLSNTIQALGRGFDVTSDIRLLYCKGAPGSRLVNLNETEAKDLAVSDGVVVPNVPADIQCSSGSRNTERVSVCSFHEMAEYFNKKSGISSRIPLGSFNAMFNFTGSWKVDASATKSLALVGYCIPLYKVDLGAENLVLHDEIKRAVPYTWDPAALASFIENYGTHIVTSATIGGRDVVYIRQHHSSPLSTSDIQSYVKDIGDDRFGDTKGQSSAGPLKYKDKDVTVIFRRRGGDDLEQSHSRWAETVQLAPDVINMTFTPIVSLLEGVPGIKHLSRAIELYLEYKPPIEDLQYFLDFQIAQAWAPEQNNLQRKGPVCSSLQFSLMGPKLYISPDQVTVGRKPVTGLRLNLEGDKQNRRLAIHLQHLVSLPKILQPHWDAHMAIGAPRWQGPEEQDSRWFEPIKWKNFSHVSTAPIEHVETSIGDLSGVHIVTGAQLGVWDFGAKNVLHLKLLFSKVPGCTIRRSVWDHSPATPSTQRSDGSSSSHSSNRNSDDKKDKLAKLVDLTEMSKGPHDSPGHWLVTGAKLGVDKGKIVLRVKYSLLNY

SEQ ID NO: 900 - protein, 316 aa, Equisetum
MAEDEPSCTLATSVIQALGQGFDITSDIRLSYCKGSRLVQIDTEQTSDLVLPGVTASIPQVPTEIKCLPGRIMRHGTGVLDFEKMAQRFNKALSVNGKIPSGLFNAMFSFSGSWRADAHVTKSLALDGWFIMLYNLKLAQSSFKLRGEIKREVPSTWDPAALASFIERHGTHIVTSVTVGGKDAIYVKQHQSSSLTSMEIESYLKELGDRRFLARSKHSAFEMKEKGAGQSFPPPAQSLLPTSASDSSSSLTGKEDVTVIYRRRGGDDLVQNHEEWKYTIFSNPDVISMTFIPIASLLEGCPGKEHLIRAIDIYLE

SEQ ID NO: 901 - protein, 276 aa, Hedera helix (Galaxy)
MGENAAALHTAMNSVQALGKGFDVNFDTRLLYCKGVAGSRIVEIDEEHTRDLCLYDGLVVPNVSKDVHNSQTRDLCLYDGLVVPNVSKDVQNSQETIGRDGSGVCNYFEMMEYVNKKANLSENVPLGCFNAAFNFTSCKNIDAAATKTLCLDGFFIPLAKVQLVKSQLALQENVIRAVPASWDPPALASFIENFGTHVIVSVTIGGKDVIYVKQHQSSSLSKVEIKNYVQDIGNQRFSTTENHTTSGLLKYKDKGVDPSLYNSQGVHPQPSTATSP

SEQ ID NO: 902 - protein, 431 aa, Tupidanthus calyptratus
MEENAAALHTAMNSVQALGRGFDVNFDIRLLYCKGVAGSRIVEIDEEHTRDMCLYDGLVVPNVSKDVHNSQETIGRDGSGVCNYFEMVEYINKKANLSENVPVGCFNAAFNFTGCKHIDAAATKTLCLDGFFIPLAKVQLVKSQLVLQENVIRAVPASWDPPALASFIENFGTHVIVSVTIGGKDVIYVKQHQSSSLSKVEIKNYAQDIGNQRFSTTENHTYVKQHQSSPLSKVEIKNYAQDIGNQRFSTTENHTISGLLKYKDKGVDPSLYNSQGVHPQPSTATSLIGNGKEDVTVIFRRRGGDDLEQSHTQWARTVRSSPDVIEMSFFPIIPLLEGVTGKEHLAQAIDLYLEYKPQIEELRYFLEFQVPRIWAPIQDRPPGYQRKEPVCPIFAVQHDGAKALHQPRASFSWAQTRDRVLRSKIADGSSQ

SEQ ID NO: 903 - protein, 598 aa, Polystichum polyblepharum (LW12418)
MLHVTSDFCTARARRAQDWLSLMMTTLPISMFRMVWLSQMFLKTLKQGWRNHFAPLRGRKTLIRCQSCSTRNWVLEERSRQERLMPCSIFQDHGREGAQDFDQMSELFNKKLGIGGKIPSGTFNAMFNFSGSWQVDSSITKSLSVDGVVIPLYSVHLRPPFILREEVKMAVPSTWDPPALASFIEKYGTHIIISVEVGGKDTIYVKQHLSSSLTKSEVDSHVKKLVETRFQGMESGVTQAKDKFQELALTNPQKNRSQLVHDDGSSSLTSKEDITVIYRRRGGDDLVQDHLEWKKTVNTNPDILSMAFFPIVVLLDAGSGREHLNRAIEAHLQYKPPLEELQYFLEFQVTRAWAPVANQVGLPRKEPVCPSLQFSLMGPKLFISTDQVSVGRKPVTGLRLCLEGSKLNRLAVHLQHLTVLPKILQPHWDAYVAIGAPKWHGPEEQDSRWFEPVLWKNFAHVSTAPVEFSETWFGDASGAYIVTGAQLGVWDFGLKSVLHLKLLYSKVPGCTIRRSVWDHTPIGQQLSKAKKGTSSATAAAAAAATVTQTTQKLSKFVDTTEMARGPQDLPGHWLVTGAKLCVEKSNIFLRVKYSLLNY

SEQ ID NO: 904 - protein, 365 aa, Equisetum
MAEDEPSCTLATSVIQALGQGFDITSDIRLSYCKGSRLVQIDTEQTSDLVLPGVTASIPQVPTEIKCLPGRIMRHGTGVLDFEKMAQRFNKALSVNGKIPSGLFNAMFSFSGSWRADAHVTKSLALDGWFIMLYNLKLAQSSFKLRGEIKREVPSTWDPAALASFIERHGTHIVTSVTVGGKDAIYVKQHQSSSLTSMEIESYLKELGDRRFLARSKHSAFEMKEKGAGQSFPPPAQSLLPTSASDSSSSLTGKEDVTVIYRRRGGDDLVQNHEEWKYTIFSNPDVISMTFIPIASLLEGCPGKEHLIRAIDIYLECISRGSSKDVFAMKEPTCESYHCNIIYQVYIHDNTKELMHRKEMFCNKS

SEQ ID NO: 905 - protein, 368 aa, Ophioglossum pendulum
MEEDDNDSALKTSIVVNALQTLGRGFDLTCDIRIIYCKGTERSRLIEIDEEHTKTLEVPGGISIPNVSRDIKCVQGTEEHFSTGVLDFEQMAGYFNEVLSLSGKTASGVFNAVFNFSGSWNSDALATKSLAVDGWSIILYTLSLTRVPLTLIHEVKVAAPYTWDPAVLASFIERYGTHIVTSVSIGGKDVIYVKQHQSSTLTPTDVELHLKELRSVRFSPFGGHISFMMNEKVADQMLFSTQQIRPQPYNSDCSSSFTGKEDITVIYRRRGGNDLVKGHDEWKKTVPTNPDVVTMTFIPITSLLEDGPCKDHLNRAILVYLEYKPPIEELQYFLAFQVARVWAPWAPVQNELGPLQGGSQFVLLCSSV

SEQ ID NO: 906 - protein, 331 aa, Tupidanthus calyptratus
MSPLILGFFIAREFLGDSTVFSLSSTKDPSFMEPRKNMSSDALNTTLWNSIQALGRGFDVTSDIRLLYCKGIPGSRLVQINDRDAKDLRVSDEFVVPNVSVDIECSKGEKITETTPVCSFHEMAIYFNEKSEISGHVPLGSFNAMFNLTGSWQLDAATTKSLAMIGSVIPLYKVELANLDLVLNEEVKRAVPYSWDPASLASFIENYGTHIVTSATVGGRDVVYIRQHQSSPLSVSDIENYVKDIADQRYSGSRSNPSAAPLKYKDKDVTVIFRRRGGDDLEQSHVRWAETVQTSPDVINMTFIPIVSLLEGVPGIKHLACAIELYLECKI

SEQ ID NO: 907 - protein, 586 aa, Equisetum arvense
MAEDEDPVVEPCQSLAASSIQAMGRGFDLTCDIRLSYCKGVSPLVHLDQQNKKDLRLPGGISIPDAPAEIQCLHGRTSHHGTNTLNFDQMSERFNKALSIEGKIPSGLFNAMFSFSGSWRADASTTKSLALDGWFSTLYNLKLAKHSLKLHDEVKREVPSTWDPEALASFIEKHGTHIVTSVTVGGKDTIYVKQHQSSSLTSIEIESYLKELGDRRFLAGSSNPALDLNDKAAGQSSPLTGPNLVQTLGSDGPSSLTGKEDVTVIYRRRGGDDLVQNHEEWKDTIKSNPDVISMTFIPITSLLEGCPGKEHLIRAIDVYLEYKPPIEELQYFLEFQVAKAWAPVQNEGRLPRKEPVCPSLQFSLMGPKLYINTEQVSVGRRPVIGLRLCLEGSKVNRLSVHVLHLVALPKLLQPHWDSYVAIGPPKWHGPEEQDSRWFEPIQWKNFSHVSTAPIEYSEGWMGDVSGAHVVTGAQLGVWDFGPKSVLHLRLLYSKVPGCTIRRSIWDYNPNPSSFNPSTNPSKASKEVNASSSSNAPQVNKLTKFVDTEEMVKGPQDMPGHWLVTGAKLGVEKSKIFLRVKYSLLNY

SEQ ID NO: 908 - protein, 284 aa, Tupidanthus calyptratus
MSPLILGFFIAREFLGDSTVFSLSSTKDPSFMEPRKNMSSDALNTTLWNSIQALGRGFDVTSDIRLLYCKGIPGSRLVQINDRDAKDLRVSDEFVVPNVSVDIECSKGEKITETTPVCSFHEMAIYFNEKSEISGHVPLGSFNAMFNLTGSWQLDAATTKSLAMIGSVIPLYKVELANLDLVLNEEVKRAVPYSWDPASLASFIENYGTHIVTSATVGGRDVVYIRQHQSSPLSVSDIENYVKDIADQRYSGSRSNPSAAPLKYKDKDSLYQAASIITFISIRH

SEQ ID NO: 909 - protein, 537 aa, Asplenium nidus var plicatum
MTDEDASSRGAFVTAVNAVQALGRGFDVTCDIRLLYCKGTPGSRLVVIDDDHNTDLRVSDGVVIPNVSPDIRARLEKPYRPSLGVQDFHKMSEEFNKKLFIGGDIPSGMFNAMFNFSGSWQVDSSMTKSLAIDGLVLPLYSVHLRSPFILCEEVKNAVPNTWDPAALASFIEKYGTHIIRSVEIGGKDIIYVKQHPSSTLTKHEVESHLKKLVESRFQGRESDVIRRKDKENTDSSSSLTGKEDITVIYRRRGGDDLVQDHVEWKKTVNFNPDILSMAFFPIVLLLDAGSGREHLNRAIEAHLKYKPPLEELHYFLEFQLTRAWAPLVNPAGPPRKEPVCPALQFSLMGPKLFINTSQVSVGRKPVTGLRLSLEGSKLNRLAVHVQHLAVLPKILQPHWDAYVAIGAPKWHGPEEQDSRWFEPVLWKNFAHVSTAPVEFSETWFGDASGAYIVTGAQLGVWDFGLKSVLHLKLLYSKVPGCTIRRSVWDHTPTGQQQSKGTKGTSSASPAAGTAAALVACCCCCCCDTGHPETLQVC

SEQ ID NO: 910 - protein, 368 aa, Tupidanthus calyptratus
MEPRKNMSSDALNTTLWNSIQALGRGFDVTSDIRLLYCKGIPGSRLVQINDGVTKDLAVSDGFVVPNVSVDIESSRGEEVTETTAVCSFHEMAIYFNEKSEISGHVPLGSFNAMFNLTGSWQLDAATTKSLAMIGSVIPLYKVELANLDLVLNEEVKRAVPYSWDPASLASFIENYGTHIVTSATVGGRDVVYIRQHQSSPLSVSDIENYVKDIADQRYSESRSHPSAAPLKYKDKDVTVIFRRRGGDDLEQSHIRWAETVQTSPDVINMTFIPIVSLLEGVPGIKHLARAIELYLEYKPPIEDLQYFLEFQIARVWAPEQSNIQRKDPVCPSLHFSLMGPKLYISPDQVPCLVFNTLLLNCCYEPMV

SEQ ID NO: 911 - protein, 584 aa, Tupidanthus calyptratus
MEPRKNMSSDALNTTLWNSIQALGRGFDVTSDIRLLYCKGIPGSRLVQINDRDAKDLRVSDEFVVPNVSVDIECSKGEKITETTPVCSFHEMAIYFNEKSEISGHVPLGSFNAMFNLTGSWQLDAATTKSLAMIGSVIPLYKVELANLDLVLNEEVKRAVPYSWDPASLASFIENYGTHIVTSATVGGRDVVYIRQHQSSPLSVSDIENYVKDIADQRYSESRSHPSAAPLKYKDKDVTVIFRRRGGDDLEQSHIRWAETVQTSPDVINMTFIPIVSLLEGVPGIKHLARAIELYLEYKPPIEDLQYFLEFQIARVWAPEQSNIQRKDPVCPSLHFSLMGPKLYISPDQVTVGRKPVTGLRLTLEGTKQNRLAVTVGRKPVTGLRLTLEGTKQNRLAIHLQHLVSLPKILQPHWDAHMAIGAPKWQGPEEQDSRWFEPIKWKNFSHVSTAPIEHTETCIGDLSGVYIVTGAQFGVWDFGASKSVLHLKLLFSKVPGCTIRRTVWDHSPSNVSGVQRSNGASTSLLHERTTDSSGHIGKLAKIVDMTEMSKGPQDIPGHWLVTGAKLGVDKGKIVLRIKYSLLNY

SEQ ID NO: 912 - protein, 376 aa, Verbascum chaixii (Vill)
MALPSENALITTLGNSIQALGRGFDVTSDIRLLYCKGAPGSRLVHINEEQTRNLEISGSYAIPNVSVDIECSQGQSFNNKTPVWSFHEMAKYFNEKSGLPGNIPLGCFNAMFNFSGSRQLDAAATKSLAMVGYIIPLFTVKLAKPDLILHDQIKRAVPYSWDPASLASFIENYGTHIVTSATIGGRDVVYIRQHQSSPLSTSDIENYVKDIGDQRFSDSKGNSSAGSLKYKDKDVTVIFRRRGGDDLEQSYEKWAKSVEGAPDVISMTFTPIVSLLEGVPGIKHLARAIELYLEYKPPIEDLQYFLDFQISRAWAPEQNNNLQRKEPVCSSLQFSLMGAKLYISPDQVTVGRKPVTGLKLSLDYISPDQVYINIIP

SEQ ID NO: 913 - protein, 358 aa, Tupidanthus calyptratus
MEPRKNMSSDALNTTLWNSIQALGRGFDVTSDIRLLYCKGIPGSRLVQINDRDAKDLRVSDEFVVPNVSVDIECSKGEKITETTPVCSFHEMAIYFNEKSEISGHVPLGSFNAMFNLTGSWQLDAATTKSLAMIGSVIPLYKVELANLDLVLNEEVKRAVPYSWDPASLASFIENYGTHIVTSATVGGRDVVYIRQHQSSPLSVSDIENYVKDIADQRYSGSRSNPSAAPLKYKDKDVTVIFRRRGGDDLEQSHVRWAETVQTSPDVINMTFIPIVSLLEGVPGIKHLACAIELYLEYKPPIEDLQYFLEFQIARVWAPEQSNIQRKDPVCPSLHFSLMGPKLYISPDQVSSLGPRAE

SEQ ID NO: 914 - protein, 495 aa, Ophioglossum pendulum
MEDDDSALKVSIAVNALQTLGRGFDLTCDIRIIYCKGTEGSRLLEIDEEHTKNLELPGGISIPDVSRDIKCVQGTEKHFSTGVLHFEQMAGYFNEVLSLSGKTASGVFNAVFNFSGSWNSDALATKSLAVDGWSIILYSLSLTRAPLTLIHEVKAAVPYTWDPAALASFIEKYGTHIVTSVSVGGKDAIYVKQHQSSTLTSTDVELHLKELRSIRFSPYGGHISFLGNEKVADQMLFSTQQILPQPCNSNGSSSFAGKEDITVIYRRRGGNDLVKGHDEWKKTVPTNPDVVTMTFIPITSLLEDGPCKDHLNRAILVYLEYKPPIEELQYFLAFQVARVWAPVQNELGPPRREPVCPALQFSLMGPKLYISTEQVSVGRRPVTGLRLSLEGRNCNRLAVHVQHLTSLPKVLQPHWDAYIAIGAPKWHGPEEQDSRWFEPVLWRNFSHISTAPVEFNETWIGDASGAFVVTGAQLGVWDFGLKRLFPHKHCTCGVQ

SEQ ID NO: 915 - protein, 277 aa, Tupidanthus calyptratus
MAIYFNEKSEISGDVPLGSFNAMFNLTGSWQLDAATTKSLAMIGSVIPLYKVELANLDLVLNEEVKRAVPYSWDPASLASFIENYGTHIVTSATVGGRDVVYIRQHQSSPLSVSDIENYVKDIADQRYSESRSHPSAAPLKYKDKDVTVIFRRRGGDDLEQSHIRWAETVQTSPDVINMTFIPIVSLLEGVPGIKHLACAIELYLEYKPPIEDLQYFLEFQIARVWAPEQSNIQRKDPVCPSLHFSLMGPKLYISPDQVPCLVFNTLLLNCCYEPMV

SEQ ID NO: 916 - protein, 355 aa, Verbascum chaixii (Vill)
MASMGSENALITTLCNSIQALGRGFDVTSDIRLLYCKGAPGSRLVHINEEQTRNLEISGSYAIPNVSVDIECSQGQSFNNKTPVWSFHEMAKYFNEKSGLPGNIPLGCFNAMFNFSGSRQLDAAATKSLAMVGYIIPLFTVKLAKPDLILHDQIKRAVPYSWDPASLASFIENYGTHIVTSATIGGRDVVYIRQHQSSPLSTSDIENYVKDIGDQRFSDSKGNSSAGSLKYKDKDVTVIFRRRGGDDLEQSYEKWAKSVEGAPDVISMTFTPIVSLLEGVPGIKHLARAIELYLEYKPPIEDLQYFLDFQISRAWAPEQNNNLQRKEPVCSSLQFSLMGAKLYISPDQVYINIIP

SEQ ID NO: 917 - protein, 564 aa, Prostanthera rotundifolia
MASPPTKNFSSLTVSENALTTTLCNSIQALGRGFDVTSDIRLLYCKGAPGSRLVHIDEEQNRNLEISESCVIPNVSVDIECCGGQSSNEKTPVWSFHEMAKYFNGKSGLPGQVPLGGFNAMFNFSGSWQLDAAATKSLAMVGYIIPLFSVKLVKADLILRDEIKRAVPYSWDPASLASFIENYGTHIVTSATIGGRDVVYVRQHQSSPLSASDIENYVKDIGDQRFSDSKVNTNAGSLKYKDKDVTVIFRRRGGDDLEQSYTKWATTVERAPDVINMTFTPIISLLEGVAGIKHLARAIELYLEYKPPIEDLQYFLDFQISRVWAPEQNNLQRKEPVCPSLQFSLMGSKLYISPDQVTVGRKPVTGLKLSLEGIKQNRLTINLQHLVSLPKILQPHWDAHIAIGAPKWQGPEEQDSRWFEPIKWKNFSHVSTAPIEFTDTCIGDLSGVHIVTGAQLGVWDFGAKSVLHLKLLFSKVPGCTIRRSVWDHSPSNLSAPQKPDGSSSSLSEKGDGSSQIGKLTKIVDMTEMSKGPQDMPGHWLVTGAKLGVDKGRIVLRVKYSLLNY

SEQ ID NO: 918 - protein, 331 aa, Tupidanthus calyptratus
MSPLILGFFIAREFLGDSTVFSLSSTKDPSFMEPRKNMSSDALNTTLWNSIQALGRGFDVTSDIRLLYCKGIPGSRLVQINDGVTKDLAVSDGFVVPNVSVDIESSRGEEVTETTAVCSFHEMAIYFNEKSEISGHVPLGSFNAMFNLTGSWQLDAATTKSLAMIGSVIPLYKVELANLDLVLNEEVKRAVPYSWDPASLASFIENYGTHIVTSATVGGRDVVYIRQHQSSPLSVSDIENYVKDIADQRYSGSRSNPSAAPLKYKDKDVTVIFRRRGGDDLEQSHVRWAETVQTSPDVINMTFIPIVSLLEGVPGIKHLACAIELYLECKI

SEQ ID NO: 919 - protein, 581 aa, Ophioglossum pendulum
MEDDDSALKVSIAVNALQTLGRGFDLTCDIRIIYCKGTEGSRLLEIDEEHTKNLELPGGISIPDVSRDIKCVQGTEKHFSTGVLHFEQMAGYFNEVLSLSGKTASGVFNAVFNFSGSWNSDALATKSLAVDGWSIILYSLSLTRAPLTLIHEVKAAVPYTWDPAALASFIEKYGTHIVTSVSVGGKDAIYVKQHQSSTLTSTDVELHLKELRSIRFSPYGGHISFLGNEKVADQMLFSTQQILPQPCNSNGSSSFAGKEDITVIYRRRGGNDLVQGHDEWKKTVPTNPDVVTMTFVPITSLLENGPRSDHLSRAILVYLEYKPPIEELQYFLAFQVARVWAPVQNELGPPRREPVCPALQFSLMGPKLYISTEQVSVGRRPVTGLRLSLEGRNCNRLAVHVQHLTSLPKVLQPHWDAYIAIGAPKWHGPEEQDSRWFEPVLWRSFSHISTAPVEFSETWVGDASGAFIVTGAQLGVWDFGLKSVLYLRLLYSKVPGCTIRRSVWDHTPVSLNQNLKMDSSKVLNTVPTATSQTPKLLKFVDTTEMSRGAQDMPGHWLVTGAKLGVDKSKIFLRVRYSLLNY

SEQ ID NO: 920 - protein, 550 aa, Equisetum
MASWELNIIYGSSVPWVWESIGGGIDTIHYMIKSWTDQEVDHCGLPCSKIRAGLYQMAQRFNKALSVNGKIPSGLFNAMFSFSGSWRADAHVTKSLALDGWFIMLYNLKLAQSSFKLRGEIKREVPSTWDPAALASFIERHGTHIVTSVTVGGKDAIYVKQHQSSSLTSMEIESYLKELGDRRFLARSKHSAFEMKEKGAGQSFPPPAQSLLPTSASDSSSSLTGKEDVTVIYRRRGGDDLVQNHEEWKYTIFSNPDVISMTFIPIASLLEGCPGKEHLIRAIDIYLEYKPPIEELQYFLEFQVAKVWAPVQNEGRLPRKEPVCPSLQFSLMGPKLYINTEQVSVGRRPVIGLRLCLEGSKVNRLSVHVLHLVALPKLLQPHWDSYVAIGPPKWHGPEEQDSRWFEPIQWKNFSHVSTAPIEYSEGWMGDDSGAHVVTGAQLGVWDFGPKSVLFLRLLYSKVPRCTIRRSVWDHNPASYHDSDASKDIINTSPISSSGALQVNKLVKFVDTEEMTRGPHDMPGHWLVTGAKLGVEKSRIFLRAKYSLLNY

SEQ ID NO: 921 - protein, 397 aa, Selaginella victoriae (LW10887)
MERGMAQGKIGAQITASEAVQALGKGFDVTLDLRLASCKGSFGRLVELDERNLQDLFVQERVVVPNVSKDIKCEKGEFTHFRSEVLTFHQMSERFNQGLSITGKMPLGLFNSMYSFNGTWQSDASDTKSLALDGWFITLYNLQISRSPLVLRDEVKKAVPTSWDPAALAKFIDTYGTHIITSIKVGGKDVVYVRQHQSSPLSPTELQKFIKRIADQKFADYNGVASDSNNMKEKVPTPDLLSHAHRIQLENAFTSSSFTAKEDVEIIFRRRGGDSLLKNHNDWLKTVADAPDVISMTFVPITALLNGVLGSGFLSHAVNLYLRHKPPIEDLQYFLDFQIPRQWSPGFDLPLGPQRKEPVCPAMQFSLMGPKLYVSTTQVCFISLKVLNASSLVLFTR

SEQ ID NO: 922 - protein, 603 aa, Huperzia phlegmaria
MDKKAVSNSTVEAKALEAVGALGRGYDVTLDLKLSYCKGSPESCLIQLDKQNLHDIVVPGGFTLFNISKDITCDKGERTRFRSDVLTFHEMSERFNQGLSINARIPLGLFNSMFNFRGPWHIDAQATKSLSLDGWFVTLYKMQIAKTPLVLCDEVKQAVPSSWDAAALANFIVKYGTHIVLSVKMGGKDAIYIRQQASSHLSPLEVQKYLKKIGDQKFREFKEPKEILNKEVTSAPTTMNLAQHLQFAKTYHSISFTSKKDIEIIMQRRGGNDFVEAHEEWLPTVSSAPEVISMTFVPIASLLNGVAGSGYLSHAINLYIRYKPPIEEIQQFLEFQIPRQWTPGYDLPLGPQRKEPLGPALQFSFLGPKLHISTNEVSVGLRPVTGLRLYLGGKKFNRLSLHLQHLSTLPKSLQPYWKTSLSSEARLWKEPEDQNSRWFEPVQWKGFSHVTTAPVELEANATDTAFAYVVIGAQLQVWELDSKKVLFLRLLFLKIHGCSIRRSAWDHMPTLSQKSGLLSQLGLSTSMSSNQHAISTPFVQNSAVFPGGPPAPAPNAKLLKFVNITEMTKGAQDLPGHWLVTGAKLDVENGKISLGVKYSLLHY

SEQ ID NO: 923 - protein, 463 aa, Huperzia carriata (Philippines)
MQITTTSLVLRDEVKQAVPSTWDAAALANFIEKYGTHIVLSVKMGGKDVIYIRQEAQSQLSPFEIQKNLKNIGDLKFHGSRESSYTLNKEVISASTSKNFVEHLPVSNTYDSISFVSQKDIEIIKQRRGGDKFVEAHEDWVTTISSAPEVISMTFVPITSLLSGVLGSGFLSHAINLYMRYKPPIEEIQHFLEFQIPRQWTPGYDLPLGPPRKEPLGPALQFSFLGPKLRISTNQVTVGHKPVTGLRLCLGGKKLNRLSLHLQHLATVPKNLQAYWNTSSSNEAPVWKEPDEKNDRWFEPVQWKGFSHVTTIPMEIEPHSKGAACAFIVTGAQLQVWELETKKVLFLRVLFSKIHGCSIRRSIWDHVASSFPQKPALFSQLGLSTSMSSNQQAMPTPFSLNSAVFPGGPPAPVPNAKLLKFVNTTEMTKGAKDLPGHWLVTGAKLDVEDGKISLGVKYSLLHY

SEQ ID NO: 924 - protein, 609 aa, Selaginella victoriae (LW10887)
MERGMAQGKIGAQITASEAVQALGKGFDVTLDLRLASCKGSFGRLVELDERNLQDLFVQERVVVPNVSKDIKCEKGEFTHFRSEVLTFHQMSERFNQGLSITGKMPLGLFNSMYSFNGTWQSDASDTKSLALDGWFITLYNLQISRSPLVLRDEVKKAVPTSWDPAALAKFIDTYGTHIITSIKVGGKDVVYVRQHQSSPLSPTELQKFIKRIADQKFADYNGVASDSNNMKEKVPTPDLLSHAHRIQLENAFTSSSFTAKEDVEIIFRRRGGDSLLKNHNDWLKTVADAPDVISMTFVPITALLNGVLGSGFLSHAVNLYLRHKPPIEDLQYFLDFQIPRQWSPGFDLPLGPQRKEPVCPAMQFSLMGPKLYVSTTQVTIGRRPVTGLRLFLEGKKCNRLAIHLQHLSSLPKILQPHWESTIPIGAPVWKEPEEQDSKWFEPVQWKSFSHVSTAPVQYMEEQYIGGETSGAYIVTGAQLGVWDFGMKKVLFLRLLFSKVPGCSIRKTVWDHSPASSQKSGLFSQLGLSSTFSGARKAKPAPAIVLNSAVYPGGPPVPVPSPKLLKYVDIAEMTKGAHDIPGHWLVTGAKLDVDRGRIALRLKYSLLHY

SEQ ID NO: 925 - protein, 419 aa, Platycerium bifurcatum
MGGKDAIYIRQQASSHLSPLEVQKYLKKIGDQKFRESKEPKEILNKEVTSVPTTMNLAQHLQFAKTYHSISFTSKKDIEIIMQRRGGNDFVEAHEEWLPTVSSAPEVISMTFVPIASLLNGVAGSGYLSHAINLYIRYKPPIEEIQQFLEFQIPRQWTPGYDLPLGPQRKEPLGPALQFSFLGPKLHISTNEVSVGLRPVTGLRLYLGGKKFNRLSLHLQHLSTLPKSLQPYWKTSLSSEARLWKEPEDQNSRWFEPVQWKGFSHVTTAPVELEANATDTAFAYVVIGAQLQVWELDSKKVLFLRLLFFKIQGCSIRRSAWDHMPSLSQKSGLLSQLGLSTSMSSNQHAISTPFVQNSAVFPGGPPAPAPNAKLLKFVNITEMTKGAQDLPGHWLVTGAKLDVENGKISLGVKYSLLHY

SEQ ID NO: 926 - protein, 514 aa, Huperzia carriata (Philippines)
MSERFNQGLSINARIPLGLFNSMFNYNGPWHVDAQTTKSLALDGWFITLYKMQITTTSLVLRDEVKQAVPSTWDAAALANFIEKYGTHIVLSVKMGGKDVIYIRQEAQSQLSPFEIQKNLKNIGDLKFHGSRESSYTLNKEVISASTSKNFVEHLPVSNTYDSISFVSQKDIEIIKQRRGGDKFVEAHEDWVTTISSAPEVISMTFVPITSLLSGVLGSGFLSHAINLYMRYKPPIEEIQHFLEFQIPRQWTPGYDLPLGPPRKEPLGPALQFSFLGPKLRISTNQVTVGHKPVTGLRLCLGGKKLNRLSLHLQHLATVPKNLQAYWNTSSSNEAPVWKEPDEKNDRWFEPVQWKGFSHVTTIPMEIEPHSKGAACAFIVTGAQLQVWELETKKVLFLRVLFSKIHGCSIRRSIWDHVASSFPQKPALFSQLGLSTSMSSNQQAMPTPFSLNSAVFPGGPPAPVPNAKLLKFVNTTEMTKGAKDLPGHWLVTGAKLDVEDGKISLGVKYSLLHY

SEQ ID NO: 927 - protein, 604 aa, Huperzia tetratoides
MDKRTVVYPTAREKGLEAVRALGRGYDVTLDLKLGYCKGSRQSCLIQLDNENVHDIVVPGGFTLCNVSKDISCDKGERTRFRSDVLSFHEMSERFNQGLSINARIPLGLFNSMFNFRGPWHIDAQATKSLSLDGWFVTLYKMQIAKTSLVLCDEVKQAVPSSWDAAALASFIVKYGTHIVLSVKMGGKDAIYIRQQASSHLSPLEVQKYLKKIGDQRFRESREPKDILNKEVRSAPTTMNLAQHLQFAKTYHSISFMSKKDIEIIMQRRGGNDFVEAHEEWLPTVSSAPEVISMTFVPIASLLNGVAGSGYLSHAINLYIRYKPPIEEIQQFLEFQIPRQWTPGYDLPLGPQRKEPLGPALQFSFLGPKLHISTNQVSVGLRPVTGLRLNLGGKKFNRLSLHLQHLATLPKTLQPYWKTSLSSEARLWKEPEEQNSRWFEPVQWKGFSHVTTAPVELEPSATDTAFAYVVIGAQLQVWDLDSKKVLFLRLLFLKIHGCSVRRSAWDHMPSLSQKSGLLSQLGLSSTSMPSNKHAAPTPFVQNSAVFPGGPPAPAPNARLLKFVNITEMTKGAQDLPGHWLVTGAKLDVENGKISLAVKYSLLHY

SEQ ID NO: 928 - protein, 603 aa, Huperzia nummulariifolia
MDKKAVSNSTVEAKALEAVGALGRGYDVTLDLKLSYCKGSPESCLIQLDKQHLHDIVVPGGFTLFNISKDITCDKGERTRFRSDVLSFNEMSERFNQGISINGRMPLGLFNSMFNFRGPWHIDAQATKSLSLDGWFVTLYKMQIAKTPLVLCEEVKQAVPSSWDAAALANFIVKYGTHIVLSVKMGGKDAIYIRQQASSHLSPLEVQKYLKKIGDQKFRESKEPKEILNKEVTSVPTTMNLAQHLQFAKTYHSISFTSKKDIEIIMQRRGGNDFVEAHEEWLPTVSSAPEVISMTFVPIASLLNGVAGSGYLSHAINLYIRYKPPIEEIQHFLEFQIPRQWTPGYDLPLGPQRKEPLGPALQFSFLGPKLHISTNEVSVGLRPVTGLRLYLGGKKFNRLSLHLQHLATLPKTLQPYWKTSLSGEARLWKEPEEQNSRWFEPVQWKGFSHVTTAPVELEPCAMDTAFAYVVIGAQLQVWELDSKKVLFLRLLFFKIQGCSIRRSAWDHMPSLSQKSGLLSQLGLSTSMSSNQHAISTPFVQNSAVFPGGPPAPAPNAKLLKFVNITEMTKGAQDLPGHWLVTGAKLDVENGKISLGVKYSLLHY

SEQ ID NO: 929 - protein, 604 aa, Huperzia squarrosa
MDKRAVLNSTVQSKAIEAVGALGRGYDVTLDLKLGYCKGSPESCLIELDKQHFHDIVVPGDFTLLNVSKDITCDKGERTRFRSDVLSFHEMSERFNQGTSINGRMPLGLFNSMFNFRGPWHIDAQATKSLSLDGWFVTLYKMQVSRTSLVLCDEVKQAVPSSWDAAALASFIEKYGTHIVLSVKMGGKDVIYIRQQASSNLSPLEVQKYLKKIGDQRFRESREPKDIINKDATSAPTSMNLAQHLQIAKTYHSISFVSKKDIEIIKQRRGGSDFVKSHEEWLTTVSSAPEVISMTFVPIASLLNGVAGSGYLSHAINLYIRYKPPIEEIQQFLEFQIPRQWTPGYDLPLGPQRKEPLGPALQFSFLGPKLHISTNQVSVGLRPVTGLRLYLGGKKFNRLSLHLQHLATLPKSLQPYWKTSLSSEARMWKEPEDQSSRWFEPVQWKGFSHVTTAPVELEANATDTAFAYVVIGAQLQVWELDSKKVLFLRLLFLKIHGCSVRRSAWDHMPSLSQKSGLLSQLGLSSTSMSSNKHAASTPFVQNSAVFPGGPPALAPNAKLLKFVNITEMTKGAEDVPGHWLVTGAKLDVENGKISLGVKYSLLHY

SEQ ID NO: 930 - protein, 603 aa, Huperzia squarrosa
MDKRTVVYPTAREKGLEAVRALGRGYDVTLDLKLGYCKGSPQSCLIQLDNQNVHDIVVPGGFTLFNVSKDISCDKGERTRFRSDVLSFHEMSERFNQGTSINGRMPLGLFNSMFNYNGPWHVDAQTTKSLALDGWFITLYKMQITTTSLVLRDEVKQEVPSAWDAAALANFIEKYGTHIVLSVKMGGKDVIYIRQQASSNLSPLEVQKYLKKIGDQRFRESREPTDILNKEVTSAPTTMNLAQHLQFAKTYHSISLTSKKDIEIIMQRRGGNDFVEAHEGWLQTVSSAPEVISMTFVPIASLLNGVAGSGYLSHAINLYIRYKPPIEEIQQFLEFQIPRQWTPGYDLPLGPQRKEPLGPALQFSFLGPKLHISTNQVSVGLRPVTGLRLYLGGKKFNRLSLHLQHLATLPKTLQPYWKTSLSSEARLWKEPEEQNSRWFEPVQWKGFSHVTTAPVELEPCATDTAFAYVVIGAQLQVWELDSKKVLFLRLLFLKIHGCSVRRSAWDHMPSLSQKSGLLSQLGLSTSMSSNQHAVSTPFVQNSAVFPGGPPAPAPNAKLLKFVNITEMTKGAEDVPGHWLVTGAKLDVENGKISLGVKYSLLHY

SEQ ID NO: 931 - protein, 513 aa, Huperzia carriata (Philippines)
MSERFNQGLSINARIPLGLFNSMFNFRGPWHIDAQATKSLSLDGWFVTLYRMQITKTPLVLCDEVKQAVPSSWDAAALANFIVKYGTHIVLSVKMGGKDAIYIRQQASSQLSPLEVQKYLKKIGDQKFRESKEPKEILNKEVTSAPTTMNLAQHLQFAKTYHSISFTSKKDIEIIMQRRGGNDFVEAHEEWLPTVSSAPEVISMTFVPIASLLNGVAGSGYLSHAINLYIRYKPPIEEIQQFLEFQIPRQWTPGYDLPLGPQRKEPLGPALQFSFLGPKLHISTNEVSVGLRPVTGLRLYLGGKKFNRLSLHLQHLSTLPKSLQPYWKTSLSSEARLWKEPEDQSSRWFEPVQWKGFSHVTTAPVELEANATDTAFAYVVIGAQLQVWELDSKKVLFLRLLFFKIQGCSIRRSAWDHMPSLSQKSGLLSQLGLSTSMSSNQHAISTPFVQNSAVFPGGPPAPAPNAKLLKFVNTTEMTKGAKDLPGHWLVTGAKLDVEDGKISLGVKYSLLHY

SEQ ID NO: 932 - protein, 603 aa, Huperzia carinata
MDKRAVLNSTVQSKAIEAVGALGRGYDVTLDLKLGYCKGSPESCLIELDKQHFHDIVVPGDFTLFNVSKDITCDKGERTRFRSDVLNFHEMSERFNQGLSINARIPLGLFNSMFNFRGPWHIDAQATKSLSLDGWFVTLYRMQIAKTPLVLCDEVKQAVPSSWDAAALANFIVKYGTHIVLSVKMGGKDAIYIRQQASSQLSPLEVQKYLKKIGDQKFRESKEPKEILNKEVTSAPTTMNLAQHLQFAKTYHSISFTSKKDIEIIMQRRGGNDFVEAHEEWLPTVSSAPEVISMTFVPIASLLNGVAGSGYLSHAINLYIRYKPPIEEIQQFLEFQIPRQWTPGYDLPLGPQRKEPLGPALQFSFLGPKLHISTNEVSVGLRPVTGLRLYLGGKKFNRLSLHLQHLSTLPKSLQPYWKTSLSSEARLWKEPEDQNSRWFEPVQWKGFSHVTTAPVELEANATDTAFAYVVIGAQLQVWELDSKKVLFLRLLFFKIQGCSIRRSAWDHMPSLSQTGILSQLGLSSTSMSSNKHAMSTPFVQNSAVFPGGPPAPAPNAKLLKFVNITEMTKGAQDLPGHWLVTGAKLDVENGKISLGVKYSLLHY

SEQ ID NO: 933 - protein, 420 aa, Platycerium bifurcatum
MGGKDAIYIRQQASSHLSPLEVQKYLKKIGDQKFRESKEPKEILNKEVTSVPTTMNLAQHLQFAKTYHSISFTSKKDIEIIMQRRGGNDFVEAHEEWLPTVSSAPEVISMTFVPIASLLNGVAGSGYLSHAINLYIRYKPPIEEIQHFLEFQIPRQWTPGYDLPLGPPRKEPLGPALQFSFLGPKLHISTNQVAVGHRPVTGLRLCLGGKKFNRLSLHLQHLATVPKNLQPYWNTSSSNEAPVWKEPDEKNDRWFEPVQWKGFAHVATIPMEIEPHSKGTACAYIVTGAQLQVWELETKKVLFLRLLFSKIHGCSIRRSIWDHVASSFPQKPALFSQLGLSTSMSSNQQAMPTPFSLNSAVFPGGPPAPAPNAKLLKFVNTTEMTKGAKDLPGHWLVTGAKLDVENGKISLGVKYSLLHY

SEQ ID NO: 934 - protein, 604 aa, Huperzia carriata (Solomon Islands)
MDKRTVVYPTTREKGLEAVRALGRGYDVTLDLKLGYCKGSPKSCLIQLDNQNVHDIVVPGGFTLFNVSKDISCDKGERTRFRSDVLTFHEMSERFNQGLSINARIPLGLFNSMFNYNGPWHVDAQTTKSLALDGWFITLYKMQITTTSLVLRDEVKQAVPSTWDAAALANFIEKYGTHIVLSVKMGGKDVIYIRQQAQSQLSPFEIQKNLKKIGDLKFQGSRESSYTLNKEVISASTSKNFVQHLPVSNTYDSISFVSQKDIEIIKQRRGGDKFVEAHEDWVTTISSAPEVISMTFVPITSLLSGVLGSGFLSHAINLYMRYKPPIEEMQHFLEFQIPRQWTPGYDLPLGPPRKEPLGPALQFSFLGPKLHISTNQVTVGHRPVTGLRLCLGGKKFNRLSLHLQHLATVPKNLQAYWNTSSSNEAPVWKEPDEKNDRWFEPVQWKGFSHVTTIPMEIEPHSKGAACAFIVTGAQLQVWELETKKVLFLRVLFSKIHGCSIRRSIWDHVASSFPQKPALFSQLGLSTSMSSNQQAMPTPFSLNSAVFPDGPPAPAPNAKLLKFVNTTEMTKGAKDLPGHWLVTGAKLDVENGKISLGVKYSLLHY

SEQ ID NO: 935 - protein, 604 aa, Huperzia carinata
MDKRTVVYPTTREKGLEAVRALGRGYDVTLDLKLGYCKGSPKSCLIQLDNQNVHDIVVPGGFTLFNVSKDISCDKGERTRFRSDVLNFHEMSERFNQGLSINARIPLGLFNSMFNFRGPWHIDAQATKSLSLDGWFVTLYRMQIAKTPLVLCDEVKQAVPSSWDAAALANFIVKYGTHIVLSVKMGGKDAIYIRQQASSQLSPLEVQKYLKKIGDQRFRESREPKDIINKEATSTPTSMNLAQHLQIAKTYHSISFTSKKDIEIIMQRRGGNDFVEAHEEWLPTVSSAPEVISMTFVPIASLLNGVAGSGYLSHAINLYIRYKPPIEEIQQFLEFQIPRQWTPGYDLPLGPQRKEPLGPALQFSFLGPKLHISTNEVSVGLRPVTGLRLYLGGKKFNRLSLHLQHLSTLPKSLQPYWKTSLSSEARLWKEPEDQNSRWFEPVQWKGFSHVTTAPVELEANATDTAFAYVVIGAQLQVWELETKKVLFLRVLFSKIHGCSIRRSIWDHVASSFPQKPALFSQLGLSTSMSSNQQAMPTPFSLNSAVFPDGPPAPAPNAKLLKFVNTTEMTKGAKDLPGHWLVTGAKLDVENGKISLGVKYSLLHY

SEQ ID NO: 936 - protein, 604 aa, Huperzia squarrosa
MDKRTVVYPTAREKGLEAVRALGRGYDVTLDLKLGYCKGSPQSCLIQLDNQNVHDIVVPGGFTLFNVSKDISCDKGERTRFRSDVLSFHEMSERFNQGTSINGRMPLGLFNSMFNFRGPWHIDAQATKSLSLDGWFVTLYKMQVSRTSLVLCDEVKQAVPSSWDAAALASFIEKYGTHIVLSVKMGGKDVIYIRQQASSNLSPLEVQKYLKKIGDQRFRESREPKDIINKDATSAPTSMNLAQHLQIAKTYHSISFVSKKDIEIIKQRRGGSDFVKSHEEWLTTVSSAPEVISMTFVPIASLLNGVAGSGYLSHAINLYIRYKPPIEEIQQFLEFQIPRQWTPGYDLPLGPQRKEPLGPALQFSFLGPKLHISTNQVSVGLRPVTGLRLYLGGKKFNRLSLHLQHLATLPKSLQPYWKTSLSSEARMWKEPEDQSSRWFEPVQWKGFSHVTTAPVELEANATDTAFAYVVIGAQLQVWELDSKKVLFLRLLFLKIHGCSVRRSAWDHMPSLSQKSGLLSQLGLSSTSMSSNKHAASTPFVQNSAVFPGGPPALAPNAKLLKFVNITEMTKGAEDVPGHWLVTGAKLDVENGKISLGVKYSLLHY

SEQ ID NO: 937 - protein, 603 aa, Huperzia carriata (Solomon Islands)
MDNRAVLNSTVQSKAIEAVGALGRGYDVTLDLKLGYCKGSPESCLIELDKQHFHDIVVPGDFTLFNVSKDITCDKGERTRFRSDVLTFHEMSERFNQGLSINARIPLGLFNSMFNFRGPWHIDAQATKSLSLDGWFVTLYRMQIAKTPLVLCDEVKQAVPSSWDAAALANFIVKYGTHIVLSVKMGGKDVIYIRQQASSHLSPLEVQKYLKKIGDQKFRESKEPKEILNKEVTSAPTTMNLAQHLQFAKTYHSISFTSKKDIEIIMQRRGGNDFVEAHEEWLPTVSSAPEVISMTFVPIASLLNGVSGSGYLSHAINLYIRYKPPIEEIQQFLEFQIPRQWTPGYDLPLGPQRKEPLGPALQFSFLGPKLHISTNEVSVGLRPVTGLRLYLGGKKFNRLSLHLQHLSTLPKSLQPYWKTSLSSEARLWKEPEDQNSRWFEPVQWKGFSHVTTAPVELEGNATDTAFAYVVIGAQLQVWELDSKKVLFLRLLFLKIHGCSVRRSAWDHMPSLSQKSGLLSQLGLSTSMSSNQHAISTPFVQNSAVFPGGPPAPAPNAKLLKFVNITEMTKGAEDVPGHWLVTGAKLDVENGKISLGVKYSLLHY

SEQ ID NO: 938 - protein, 316 aa, Huperzia carriata (Philippines)
MSERFNQGLSINARIPLGLFNSMFNFRGPWHIDAQATKSLSLDGWFVTLYRMQITKTPLVLCDEVKQAVPSSWDAAALANFIVKYGTHIVLSVKMGGKDAIYIRQQASSQLSPLEVQKYLKKIGDQKFRESKEPKEILNKEVTSAPTTMNLAQHLQFAKTYHSISFTSKKDIEIIMQRRGGNDFVEAHEEWLPTVSSAPEVISMTFVPIASLLNGVAGSGYLSHAINLYIRYKPPIEEIQQFLEFQIPRQWTPGYDLPLGPQRKEPLGPALQFSFLGPKLHISTNEVSVGLRPVTGLRLYLGGKKSSFVSWRKEVQ

SEQ ID NO: 939 - protein, 478 aa, Huperzia squarrosa
MSERFNQGTSINGRMPLGLFNSMFNFRGPWHIDAQATKSLSLDGWFVTLYKMQVSRTSLVLCDEVKQAVPSSWDAAALASFIEKYGTHIVLSVKMGGKDVIYIRQQASSNLSPLEVQKYLKKIGDQRFRESREPTDILNKEVTSAPTTMNLAQHLQFAKTYHSISLTSKKDIEIIMQRRGGNDFVEAHEGWLQTVSSAPEVISMTFVPIASLLNGVAGSGYLSHAINLYIRYKPPIEEIQQFLEFQIPRQWTPGYDLPLGPQRKEPLGPALQFSFLGPIRLYLGGKKFNRLSLHLQHLATLPKSLQPYWKTSLSSEARMWKEPEDQSSRWFEPVQWKGFSHVTTAPVELEANATDTAFAYVVIGAQLQVWELDSKKVLFLRLLFLKIHGCSVRRSAWDHMPSLSQKSGLLSQLGLSTSMSSNQHAVSTPFVQNSAVFPGGPPAPAPNAKLLKFVNITEMTKGAEDVPGHWLVTGAKLD

SEQ ID NO: 940 - protein, 603 aa, Platycerium bifurcatum
MDKRTVVYPTTREKGLEAVRALGRGYDVTLDLKLGYCKGSPQSCLIQLDNQNVHDIVVPGGFTLFNVSNDISCDKGERTRFRSDVLSFNEMSERFNQGISINGRMPLGLFNSMFNFRGPWHIDAQATKSLSLDGWFVTLYKMQIAKTPLVLCEEVKQAVPSSWDAAALANFIVKYGTHIVLSVKMGGKDAIYIRQQASSHLSPLEVQKYLKKIGDQKFRESKEPKEILNKEVTSVPTTMNLAQHLQFAKTYHSISFTSKKDIEIIMQRRGGNDFVEAHEEWLPTVSSAPEVISMTFVPIASLLNGVAGSGYLSHAINLYIRYKPPIEEIQQFLEFQIPRQWTPGYDLPLGPQRKEPLGPALQFSFLGPKLHISTNEVSVGLRPVTGLRLYLGGKKFNRLSLHLQHLSTLPKSLQPYWKTSLSSEARLWKEPEDQNSRWFEPVQWKGFSHVTTAPVELEANATDTAFAYVVIGAQLQVWELDSKKVLFLRLLFFKIQGCSIRRSAWDHMPSLSQKSGLLSQLGLSTSMSSNQHAISTPFVQNSAVFPGGPPAPAPNAKLLKFVNITEMTKGAQDLPGHWLVTGAKLDVENGKISLGVKYSLLHY

SEQ ID NO: 941 - protein, 251 aa, Selaginella kraussiana (Variegata)
MEQEKTSAHFTASEAVQALGKGFDVTLDLRLAGCKGPHGRLVELDDTGRGDLFVQDRVVIPNVSKDIRCDKGEFTHFRSEVLTFHQMSERFNQELSITGKMPLGLFNHMYSFNGPWQADASSTKSLALDGRFITSYKLQIAKSPLVLRDEVKRAVPASWDPAALAKFIDTYGTHVIVSIKVGGKDVLYVRQHQSSPLSTTELQKLIKRFADQRFADTNGSVSDPRNVKNKMQPDLLAGRLPIESDTITAKE

SEQ ID NO: 942 - protein, 603 aa, Huperzia salvinioides
MDKKAVSNSTVEAKALEAVGALGRGYDVTLDLKLSYCKGSPESCLIQLDKQHLHDIVVPGGFTLFNISKDITCDKGERTRFRSDVLTFHEMSERFNQGLSINARIPLGLFNSMFNFRGPWHIDAQATKSLSLDGWFVTLYKMQIAKTPLVLCDEVKQAVPSSWDAAALANFIVKYGTHIVLSVKMGGKDAIYIRQQASSHVSPLEVQKYLKKIGDQKFRESKEPKEILNKEVTSATTTMNLAQHLQFAKTYHSISFTSKKDIEIIMQRRGGNDFVEAHEEWLPTVSSAPEVISMTFVPIASLLNGVAGSGYLSHAINLYIRYKPPIEEIQQFLEFQIPRQWTPGYDLPLGPQRKEPLGPALQFSFLGPKLHISTNEVSVGLRPVTGLRLYLGGKKFNRLSVHLQHLSTLPKSLQPYWKTSLSSEARLWKEPEDQNSRWFEPVQWKGFSHVTTAPVELEANATDTAFAYVVIGAQLQVWELDSKKVLFLRLLFLKIHGCSIRRSAWDHMPTLSQKSGLLSQLGLSTSMSSNQHAISTPFVQNSAVFPGGPPAPAPNAKLLKFVNITEMTKGAQDLPGHWLVTGAKLDVENGKISLGVKYSLLHY

SEQ ID NO: 943 - protein, 604 aa, Huperzia carriata (Solomon Islands)
MDNRAVLNSTVQSKAIEAVGALGRGYDVTLDLKLGYCKGSPESCLIELDKQHFHDIVVPGDFTLFNVSKDITCDKGERTRFRSDVLTFHEMSERFNQGLSINARIPLGLFNSMFNFRGPWHIDAQATKSLSLDGWFVTLYNMQVSRTSLVLCDEVKQAVPSSWDAAALASFIEKYGTHIVLSVKMGGKDVIYIRQQASSHLSPLEVQKYLKKIGDQRFRESREPKDTINKEATSTPTSMNLAQHLQIAKTYNSISFVSKKDIEIIKQRRGGSDFVKFHEEWLTTVSSAPEVISMTFVPIASLLNGVVGSGYLSHAINLYIRYKPPIEEIQQFLEFQIPRQWTPGYDLPLGPQRKEPLGPALQFSFLGPKLHVSTNQVSVGLRPVTGLRLYLGGKKFNRLSLHLQHLATLPKTLQPYWKTSLSGEARLWKEPEEQNSRWFEPVQWKGFSHVTTAPIELEPCATDTAFAYVVIGAQLQVWELDSKKVLFLRLLFLKIHGCSVRRSAWDHMPSLSQKSGILSQLGLSSTSMSSNKHPMSTPFVQNSAVFPGGPPAPAPNAKLLKFVNITEMTKGAEDVPGHWLVTGAKLDVENGKISLGVKYSLLHY

SEQ ID NO: 944 - protein, 604 aa, Huperzia nummulariifolia
MDKKAVSNSTVEAKALEAVGALGRGYDVTLDLKLSYCKGSPESCLIQLDKQHLHDIVVPGGFTLFNISKDITCDKGERTRFRSDVLSFNEMSERFNQGISINGRMPLGLFNSMFNFRGPWHIDAQATKSLSLDGWFVTLYKMQIAKTPLVLCEEVKQAVPSSWDAAALANFIVKYGTHIVLSVKMGGKDAIYIRQQASSHLSPLEVQKYLKKIGDQKFRESKEPKEILNKEVTSVPTTMNLAQHLQFAKTYHSISFTSKKDIEIIMQRRGGNDFVEAHEEWLPTVSSAPEVISMTFVPIASLLNGVAGSGYLSHAINLYIRYKPPIEEIQHFLEFQIPRQWTPGYDLPLGPQRKEPLGPALQFSFLGPKLHISTNEVSVGLRPVTGLRLYLGGKKFNRLSLHLQHLATVPKNLQPYWNTSSSNEAPVWKEPDEKNDRWFEPVQWKGFAHVATIPMEIEPHSKGTACAYIVTGAQLQVWELETKKVLFLRLLFSKIHGCSIRRSIWDHVASSFPQKPALFSQLGLSTSMSSNQQAMPTPFSLNSAVFPGGPPAPAPNAKLLKFVNTTEMTKGAKDLPGHWLVTGAKLDVENGKISLGVKYSLLHY

SEQ ID NO: 945 - protein, 606 aa, Selaginella biformis
MAQEKTSAYFTASEAVQALGKGFDTTLDLRLAGCKGPSGRLVELDETNREDLFVQDRVVIPNVSKDIRCDKGEFTHFRSEVLTFHQMSERFNQELSITGKMPLGLFNTMYSFNGPWQADASTTKSLALDGRFITSYKLQIVKSPLVLREEVKKAVPSSWDPAALAKFIDTYGTHIIVSVKVGGKDVVYVRQHQSSPLSPTELQKFIKRIADQKFAETNGSVSDSGNIKDKMQTPDLLAGSNHAHRLQLETFASSGGFTAKEDVEIIFRRRGGSNLLKSHNEWLKTVADAPDVISMTFVPITSLLNGVLGSGFLSHAVNLYLRHKPPIEDLQYFLEFQIPRQWSPGFDLPLGPQRKEPVCPAMQFSLMGPKLYVSTTQVTIGRRPVTGLRLFLEGKKCNRLGIHLQHLSSLPKILQPHWDSNVPIGPPVWKGPEEQDSKWFEPVQWKSFSHVSTQPVEFLEESYVGQTSGTYIVTGAQLGVWDFGMKKVLFLRLLFSRVPGCAIRRTVWDHSPTTSQKSGLFSQLGLSSTFSGAQKAKQAPVVLNSAVYPGGPPVPVPSPKLLKYVDITEMTKGAHDMPGHWIVTGAKLDVDRGRIALRLKYSVLHY

SEQ ID NO: 946 - protein, 608 aa, Huperzia squarrosa
MDKRTVVYPTAREKGLEAVRALGRGYDVTLDLKLGYCKGSPQSCLIQLDNQNVHDIVVPGGFTLFNVSKDISCDKGERTRFRSDVLSFHEMSERFNQGTSINGRMPLGLFNSMFNYNGPWHVDAQTTKSLALDGWFITLYKMQITTTSLVLRDEVKQEVPSAWDAAALANFIEKYGTHIVLSVKMGGKDVIYIRQQASSNLSPLEVQKYLKKIGDQRFRESREPTDILNKEVTSAPTTMNLAQHLQFAKTYHSISLTSKKDIEIIMQRRGGNDFVEAHEGWLQTVSSAPEVISMTFVPIASLLNGVAGSGYLSHAINLYIRYKPPIEEIQQFLEFQIPRQWTPGYDLPLGPQRKEPLGPALQFSFLGPKLHISTNQVSVGLRPVTGLRLYLGGKKFNRLSLHLQHLATLPKTLQPYWKTSLSSEARLWKEPEEQNSRWFEPVQWKGFSHVTTAPVELEPCATDTAFAYVVIGAQLQVWELDSKKVLFLRLLFLKIHGCSVRRSAWDHMPSLSQKSGLLSQLGLSTSMSSNQHAVSTPFVQNSAVFPGGPPAPAPNAKLLKFVNITEMTKGAEDVPGHWLVTGAKVTGAKLDVENGKISLGVKYSLLHY

SEQ ID NO: 947 - protein, 570 aa, Huperzia tetratoides
MSHDIVVPGDFTLFNVSKDITCDKGERTRFRSDVLSFHEMSERFNQGLSINARIPLGLFNSMFNFRGPWHIDAQATKSLSLDGWFVTLYKMQVSRTSMVLCDEVKQAVPSSWDAAALASFIEKYGTHIVLSVKMGGKDAIYIRQQASSHLSPLEVQKYLKKIGDQRFRESREPKDILNKEVRSAPTTMNLAQHLQFAKTYHSISFMSKKDIEIIMQRRGGNDFVEAHEEWLPTVSSAPEVISMTFVPIASLLNGVAGSGYLSHAINLYIRYKPPIEEIQQFLEFQIPRQWTPGYDLPLGPQRKEPLGPALQFSFLGPKLHISTNEVSVGLRPVTGLRLYLGGKRFNRLSLHLQHLATLPKSLQPYWKTSLSSEARLWKSLQPYWKTSLSSEARLWKEPEDQSSRWFEPVQWKGFSHVTTAPVELEANATDTSFAYVVIGAQLQVWELDSKKVLFLRLLFLKIHGCSIRRSAWDHMPSLSQKSGLLSQLGLSTSMSSNQHAISTPFVQNSAVFPGGPPAPAPNAKLLKFVNITEMTKGAQDLPGHWLVTGAKLDVDNGKISLGVKYSLLHY

SEQ ID NO: 948 - protein, 604 aa, Huperzia salvinioides
MDKKAVSNSTVEAKALEAVGALGRGYDVTLDLKLSYCKGSPESCLIQLDKQHLHDIVVPGGFTLFNISKDITCDKGERTRFRSDVLTFHEMSERFNQGLSINARIPLGLFNSMFNFRGPWHIDAQATKSLSLDGWFVTLYKMQIAKTPLVLCDEVKQAVPSSWDAAALANFIVKYGTHIVLSVKMGGKDAIYIRQQASSHVSPLEVQKYLKKIGDQKFRESKEPKEILNKEVTSATTTMNLAQHLQFAKTYHSISFTSKKDIEIIMQRRGGNDFVEAHEEWLPTVSSAPEVISMTFVPIASLLNGVAGSGYLSHAINLYIRYKPPIEEIQQFLEFQIPRQWTPGYDLPLGPQRKEPLGPALQFSFLGPKLHISTNEVSVGLRPVTGLRLYLGGKKFNRLSVHLQHLSTLPKSLQPYWKTSLSSEARLWKEPEDQNSRWFEPVQWKGFSHVTTAPVELEANATDTAFAYVVIGAQLQVWELETKKVLFLRLLFSKIHGCSIRRSIWDHVASSFPQKPALFSQLGLSTSMSSNQQAMPTPFSLNSAVFPGGPPAPASNAKLLKFVNTTEMTKGAQDLPGHWLVTGAKLDVENGKISLGVKYSLLHY

SEQ ID NO: 949 - protein, 274 aa, Huperzia nummarifolia
MQITTTSLVLRDEVKQAVPSTWDAAALANFIEKYGTHIVLSVKMGGKDVIYIRQQAQSQLSPFEIQKNLKKIGDLKFHGSRESNYTLNKEVISASTSKNFVQHLPVSNTYDSISFVSQKDIEIIKQRRGGDKFVEAHEDWVTTISSAPEVISMTFVPITSLLSGVLGSGFLSHAINLYMRYKPPIEEIQHFLEFQIPRQWTPGYDLPLGPPRKEPLGPALQFSFLGPKLHISTNQVAVGHRPVTGLRLCLGGKKFNRLSLHLQHLATVPKNLQP

SEQ ID NO: 950 - protein, 603 aa, Huperzia carinata
MDKKAVSNSTGEAKALEAVGALGRGYDVTLDLKLSYCKGSPESCLIQLDKQHLHDIVVPGGFTLFNISKDITCDKGERTRFRSDVLNFHEMSERFNQGLSINARIPLGLFNSMFNFRGPWHIDAQATKSLSLDGWFVTLYRMQIAKTPLVLCDEVKQAVPSSWDAAALANFIVKYGTHIVLSVKMGGKDAIYIRQQASSQLSPLEVQKYLKKIGDQRFRESREPKDIINKEATSTPTSMNLAQHLQIAKTYHSISFTSKKDIEIIMQRRGGNDFVEAHEEWLPTVSSAPEVISMTFVPIASLLNGVAGSGYLSHAINLYIRYKPPIEEIQQFLEFQIPRQWTPGYDLPLGPQRKEPLGPALQFSFLGPKLHISTNEVSVGLRPVTGLRLYLGGKKFNRLSLHLQHLSTLPKSLQPYWKTSLSSEARLWKEPEDQNSRWFEPVQWKGFSHVTTAPVELEANATDTAFAYVVIGAQLQVWELDSKKVLFLRLLFFKIQGCSIRRSAWDHMPSLSQKSGLLSQLGLSTSMSSNQHAISTPFVQNSAVFPGGPPAPAPNAKLLKFVNITEMTKGAQDLPGHWLVTGAKLDVENGKISLGVKYSLLHY

SEQ ID NO: 951 - protein, 597 aa, Huperzia carriata (Solomon Islands)
MDNRAVLNSTVQSKAIEAVGALGRGYDVTLDLKLGYCKGSPESCLIELDKQHFHDIVVPGDFTLFNVSKDITCDKGERTRFRSDVLTFHEMSERFNQGLSINARIPLGLFNSMFNFRGPWHIDAQATKSLSLDGWFVTLYNMQVSRTSLVLCDEVKQAVPSSWDAAALASFIEKYGTHIVLSVKMGGKDVIYIRQQASSHLSPLEVQKYLKKIGDQRFRESREPKDTINKEATSTPTSMNLAQHLQIAKTYNSISFVSKKDIEIIKQRRGGSDFVKFHEEWLTTVSSAPEVISMTFVPIASLLNGVVGSGYLSHAINLYIRYKPPIEEIQQFLEFQIPRQWTPGYDLPLGPQRKEPLGPALQFSFLGPKLHVSTNQVSVGLRPVTGLRLYLGGKKFNRLSLHLQHLATLPKTLQPYWKTSLSGEARLWKEPEEQNSRWFEPVQWKGFSHVTTAPIELEPCATDTAFAYVVIGAQLQVWELDSKKVLFLRLLFLKIHGCSVRRSAWDHMPSLSQKSGILSQLGLSSTSMSSNKHPMSTPFVQNSAVFPGGPPAPAPNAKLLKFVNITEMTKGAEDVPGHWLVTGAKLDVENGKISLGV

SEQ ID NO: 952 - protein, 604 aa, Huperzia tetratoides
MDKRTVVYPTAREKGLEAVRALGRGYDVTLDLKLGYCKGSRQSCLIQLDNENVHDIVVPGGFTLCNVSKDISCDKGERTRFRSDVLSFHEMSERFNQGLSINARIPLGLFNSMFNYNGPWHVDAQTTKSLALDGWFITLYKMQITKTSLVLRDEVKQEVPSAWDAAALANFIEKYGTHIVLSVKMGGKDVIYIRQQALSQLSPFEIQKNLKKIGDLSFHGSRESNHTLNKEVISASTSKHFAQHLPISHTYDSISFVSQKDIEIIEQRRGGDKFVKAHEDWVTTISSAPEVISMTFVPITSLLSGVLGSGFLSHAINLYMRYKPPVEEIQHFLEFQIPRQWTPGYDLPLGPPRKEPLGPALQFSFLGPKLYISTNQVTVGQRPVTGLRLCLGGKKFNRLSLHLQHLATVPKNLQPYWNTSSSSEAPVWKEPEEKSDRWFEPVQWKGFSHVATLPVEIEPHSKGTARAYIVTGAQLQVWELDTKKVLFLRLLFSKIHGCSIRRSIWDHVASSFSQKPALFSQLGLSTSMPSNQQAMPTPFSLNSAVFPGGPPAPAPNAKLLKFVNITEMTKGAQDLPGHWLVTGAKLDVENGKISLAVKYSLLHY

SEQ ID NO: 953 - protein, 603 aa, Huperzia carriata (Solomon Islands)
MDKKAVSNSTVEAKALEAVGALGRGYDVTLDLKLSYCKGSPESCLIQLDKQHLHDIVVPGGFTLFNISKDITCDKGERTRFRSDVLTFHEMSERFNQGLSINARIPLGLFNSMFNFRGPWHIDAQATKSLSLDGWFVTLYRMQIAKTPLVLCDEVKQAVPSSWDAAALANFIVKYGTHIVLSVKMGGKDVIYIRQQASSHLSPLEVQKYLKKIGDQRFRESREPKDTINKEATSTPTSMNLAQHLQIAKTYNSISFVSKKDIEIIKQRRGGSDFVKFHEEWLTTVSSAPEVISMTFVPIASLLNGVVGSGYLSHAINLYIRYKPPIEEIQQFLEFQIPRQWTPGYDLPLGPQRKEPLGPALQFSFLGPKLHVSTNQVSVGLRPVTGLRLYLGGKKFNRLSLHLQHLSTLPKSLQPYWKTSLSSEARLWKEPEDQNSRWFEPVQWKGFSHVTTAPVELEGNATDTAFAYVVIGAQLQVWELDSKKVLFLRLLFLKIHGCSVRRSAWDHMPSLSQKSGLLSQLGLSTSMSSNQHAISTPFVQNSAVFPGGPPAPAPNAKLLKFVNITEMTKGAEDVPGHWLVTGAKLDVENGKISLGVKYSLLHY

SEQ ID NO: 954 - protein, 402 aa, Huperzia nummulariifolia (Blume)
MNLAQHLQFAKTYHSISFTSKKDIEIIMQRRGGNDFVEAHEEWLPTVSSAPEVISMTFVPIASLLNGVAGSGYLSHAINLYIRYKPPIEEIQHFLEFQNAINLYIRYKPPIEEIQQFLEFQIPRQWTPGYDLPLGPQRKEPLGPALQFSFLGPKLHISTNEVSVGLRPVTGLRLYLGGKKFNRLSVHLQHLSTLPKSLQPYWKTSLSSEARLWKEPEDQNSRWFEPVQWKGFSHVTTAPVELEANATDTAFAYVVIGAQLQVWELDSGCSIRRSAWDHMPTLSQKSGLLSQLGLSTSMSSNQHAISTPFVQNSAVFPGGPPAPAPNAKLLKFVNITEMTKGAEDIPGHWLVTGAKLDVENGKISLGVGHWLVTGVQSLMLRMGKYPWVLNIHSYIIEISLGS

SEQ ID NO: 955 - protein, 514 aa, Huperzia carriata (Philippines)
MSERFNQGLSINARIPLGLFNSMFNFRGPWHIDAQATKSLSLDGWFVTLYRMQITKTPLVLCDEVKQAVPSSWDAAALANFIVKYGTHIVLSVKMGGKDAIYIRQQASSQLSPLEVQKYLKKIGDQKFRESKEPKEILNKEVTSAPTTMNLAQHLQFAKTYHSISFTSKKDIEIIMQRRGGNDFVEAHEEWLPTVSSAPEVISMTFVPIASLLNGVAGSGYLSHAINLYIRYKPPIEEIQQFLEFQIPRQWTPGYDLPLGPQRKEPLGPALQFSFLGPKLHISTNEVSVGLRPVTGLRLYLGGKKFNRLSLHLQHLSTLPKSLQPYWKTSLSSEARLWKEPEDQSSRWFEPVQWKGFSHVTTAPVELEANATDTAFAYVVIGAQLQVWELETKKVLFLRVLFSKIHGCSIRRSIWDHVASSFPQKPALFSQLGLSTSMSSNQQAMPTPFSLNSAVFPGGPPAPVPNAKLLKFVNTTEMTKGAKDLPGHWLVTGAKLDVEDGKISLGVKYSLLHY

SEQ ID NO: 956 - protein, 601 aa, Platycerium bifurcatum
MDKRTVVYPTTREKGLEAVRALGRGYDVTLDLKLGYCKGSPQSCLIQLDNQNVHDIVVPGGFTLFNVSNDISCDKGERTRFRSDVLSFNEMSERFIKVFLSMVPLGLFNSMFNYNGPWHVDAQTTKSLALDGWFITLYKMQITTTSLVLRDEVKQAVPSTWDAAALANFIEKYGTHIVLSVKMGGKDAIYIRQQASSHLSPLEVQKYLKKIGDQKFRESKEPKEILNKEVTSVPTTMNLAQHLQFAKTYHSISFTSKKDIEIIMQRRGGNDFVEAHEEWLPTVSSAPEVISMTFVPIASLLNGVAGSGYLSHAINLYIRYKPPIEEIQHFLEFQIPRQWTPGYDLPLGPPRKEPLGPALQFSFLGPKLHISTNQVAVGHRPVTGLRLCLGGKKFNRLSLHLQHLSTLPKSLQPYWKTSLSSEARLWKEPEDQNSRWFEPVQWKGFSHVTTAPVELEANATDTAFAYVVIGAQLQVWELDSKKVLFLRLLFFKIQGCSIRRSAWDHMPSLSQKSGLLSQLGLSTSMSSNQHAISTPFVQNSAVFPGGPPAPAPNAKLLKFVNITEMTKGAQDLPGHWLVTGAKLDVENGKISLGVKYSLLHY

SEQ ID NO: 957 - protein, 296 aa, Huperzia salvinioides
MDKRAVLNSTVQSKAIEAVGALGRGYDVTLDLKLGYCKGSPESCLIELDKQHFHDIVVPGDFTLFNVSKDITCDKGERTRFRSDVLSFHEMSERFNQGLSINARIPLGLFNSMFNFRGPWHIDAQATKSLSLDGWFVTLYNMQVSRTSLVLCDEVKQAVPSSWDAAALASFIEKYGTHIVLSVKMGGKDAIYIRQQASSHVSPLEVQKYLKKIGDQRFRESREPKDIINKEATSTPTSMNLAQHLQIAKTYHSISFVSKKDIINKEATSTPTSMNLAQHLQIAKTYHSISFVSKKD

SEQ ID NO: 958 - protein, 523 aa, Huperzia carriata (Philippines)
MSERFNQGLSINARIPLGLFNSMFNFRGPWHIDAQATKSLSLDGWFVTLYNMQVSRTSLVLCDEVKQAVPSSWDAAALASFIEKYGTHIVLSVKMGGKDAIYIRQQASSQLSPLEVQKYLKKIGDQKFRESKEPKEILNKEVTSAPTTMNLAQHLQFAKTYHSILQFAKTYHSISFTSKKDIEIIMQRRGGNDFVEAHEEWLPTVSSAPEVISMTFVPIASLLNGVAGSGYLSHAINLYIRYKPPIEEIQQFLEFQIPRQWTPGYDLPLGPQRKEPLGPALQFSFLGPKLHISTNEVSVGLRPVTGLRLYLGGKKFNRLSLHLQHLSTLPKSLQPYWKTSLSSEARLWKEPEDQSSRWFEPVQWKGFSHVTTAPVELEANATDTAFAYVVIGAQLQVWELDSKKVLFLRLLFFKIQGCSIRRSAWDHMPSLSQKSGLLSQLGLSTSMSSNQHAISTPFVQNSAVFPGGPPAPAPNAKLLKFVNTTEMTKGAKDLPGHWLVTGAKLDVENGKISLGVKYSLLHY

SEQ ID NO: 959 - protein, 365 aa, Huperzia nummarifolia
MNLAQHLQIAKTYHSISFVSKKDIEIIKQRRGGSDFVKSHEEWLTTVSSAPEVISMTFVPIASLLNGVAGSGYLSHAINLYIRYKPPIEEIQQFLEFQIPRQWTPGYDLPLGPQRKEPLGPALQFSFLGPKLHISTNEVSVGLRPVTGLRLYLGGKKFNRLSLHLQHLSTLPKSLQPYWKTSLSSEARLWKEPEDQNSRWFEPVQWKGFSHVTTAPVELEANATDTAFAYVVIGAQLQVWELDSKKVLFLRLLFFKIQGCSIRRSAWDHMPSLSQKSGLLSQLGLSTSMSSNQHAISTPFVQNSAVFPGGPPAPAPNAKLLKFVNITEMTKGAQDLPGHWLVTGAKLDVENGKISLGVKYSLLHY

SEQ ID NO: 960 - protein, 607 aa, Huperzia carinata
MDKRTVVYPTTREKGLEAVRALGRGYDVTLDLKLGYCKGSPKSCLIQLDNQNVHDIVVPGGFTLFNVSKDISCDKGERTRFRSDVLNFHEMSERFNQGLSINARIPLGLFNSMFNYNGPWHVDAQTTKSLALDGWFITLYKMQITMTSLVLRDEVKQAVPSTWDAAALANFIEKYGTHIVLSVKMGGKDAIYIRQQASSQLSPLEVQKYLKKIGDQRFRESREPKDIINKEATSTPTSMNLAQHLQIAKTYHSISFVSKKDIEIIKQRRGGSDFVKSHEEWLTTVSSAPEVISMTFVPIASLLNGVAGSGYLSHAINLYIRYKPPIEEIQQFLEFQIPRQWTPGYDLPLGPQRKEPLGPALQFSFLGPKLHISTNEVSVGLRPVTGLRLYLGGKKFNRLSLHLQHLSTLPKSLQPYWKTSLSSEARLWKEPEDQNSRWFEPVQWKGFSHVTTAPVELEANATDTAFAYVVIGAQLQVWELDSKKVLFLRLLFFKIQGCSIRRSAWDHMPSLSQMSQKSGILSQLGLSSTSMSSNKHAMSTPFVQNSAVFPGGPPAPAPNAKLLKFVNITEMTKGAQDLPGHWLVTGAKLDVENGKISLGVKYSLLHY

SEQ ID NO: 961 - protein, 604 aa, Huperzia nummarifolia
MDKRTVVYPTTRDKGLEAVRALGRGYDVTLDLKLGYCKGSPKSCLIQLDNQNVHDIVVPGGFTLFNVSKDISCDKGERTRFRSDVLTFHEMSERFNQGLSINARIPLGLFNSMFNFRGPWHIDAQATKSLSLDGWFVTLYKMQIAKTPLVLCEEVKQAVPSSWDAAALANFIVKYGTHIVLSVKMGGKDAIYIRQQASSHLSPLEVQKYLKKIGDQKFRESKEPKEILNKEVTSVPTTMNLAQHLQFAKTYHSISFTSKKDIEIIMQRRGGNDFVEAHEEWLPTVSSAPEVISMTFVPIASLLNGVAGSGYLSHAINLYIRYKPPIEEIQQFLEFQIPRQWTPGYDLPLGPQRKEPLGPALQFSFLGPKLHISTNEVSVGLRPVTGLRLYLGGKKFNRLSLHLQHLATVPKNLQPYWNTSSSNEAPVWKEPDEKDDRWFEPVQWKGFAHVATIPMEIEPHSKGTACAYIVTGAQLQVWELETKKVLFLRLLFSKIHGCSIRRSIWDHVASSFPQKPALFSQLGLSTSMSSNQQAMPTPFSLNSAVFPGGPPAPAPNAKLLKFVNTTEMTKGAKDLPGHWLVTGAKLDVENGKISLGVKYSLLHY

SEQ ID NO: 962 - protein, 496 aa, Huperzia carinata
MDKRAVLNSTVQSKAIEAVGALGRGYDVTLDLKLGYCKGSPESCLIELDKQHFHDIVVPGDFTLFNVSKDITCDKGERTRFRSDVLNFHEMSERFNQGLSINARIPLGLFNSMFNFRGPWHIDAQATKSLSLDGWFVTLYNMQVSRTSLVLCDEVKQAVPSSWDAAALASFIEKYGTHIVLSVKMGGKDAIYIRQQASSQLSPLEVQKYLKKIGDQKFRESKEPKEILNKEVTSAPTTMNLAQHLQFAKTYHSISFTSKKDIEIIMQRRGGNDFVEAHEEWLPTVSSAPEVISMTFVPIASLLNGVAGSGYLSHAINLYIRYKPPIEEIQQFLEFQIPRQWTPGYDLPLGPQRKEPLGPALQFSFLGPKLHISTNEVSVGLRPVTGLRLYLGGKKFNRLSLHLQHLSTLPKSLQPYWKTSLSSEARLWKEPEDQNSRWFEPVQWKGFSHVTTAPVELEANATDTAFAYVVIGAQWSTAASLGAGFKEGAISETLVL

SEQ ID NO: 963 - protein, 507 aa, Huperzia carriata (Solomon Islands)
MSERFNQGLSINARIPLGLFNSMFNFRGPWHIDAQATKSLSLDGWFVTLYRMQIAKTPLVLCDEVKQAVPSSWDAAALANFIVKYGTHIVLSVKMGGKDVIYIRQQASSHLSPLEVQKYLKKIGDQRFRESREPKDTINKEATSTPTSMNLAQHLQIAKTYNSISFVSKKDIEIIKQRRGGSDFVKFHEEWLTTVSSAPEVISMTFVPIASLLNGVVGSGYLSHAINLYIRYKPPIEEIQQFLEFQIPRQWTPGYDLPLGPQRKEPLGPALQFSFLGPKLHVSTNQVSVGLRPVTGLRLYLGGKKFNRLSLHLQHLATLPKTLQPYWKTSLSGEARLWKEPEEQNSRWFEPVQWKGFSHVTTAPIELEPCATDTAFAYVVIGAQLQVWELDSKKVLFLRLLFLKIHGCSVRRSAWDHMPSLSQKSGILSQLGLSSTSMSSNKHPMSTPFVQNSAVFPGGPPAPAPNAKLLKFVNITEMTKGAEDVPGHWLVTGAKLDVENGKISLGV

SEQ ID NO: 964 - protein, 604 aa, Huperzia phlegmaria
MDKRTVVYLTTREKGLEAVRALGRGYDVTLDLKLGYCKGSPKSCLIQLDNQNVHDIVVPGGFTLSNVSKDISCDKGERTRFRSDVLSFNEMSERFNQGLSINARIPLGLFNSMFNFRGPWHIDAQATKSLSLDGWFVTLYKMQIAKTPLVLCDEVKQAVPSSWDAAALANFIVKYGTHIVLSVKMGGKDAIYIRQQASSHLSPLEVQKYLKKIGDQKFREFKEPKEILNKEVTSAPTTMNLAQHLQFAKTYHSISFTSKKDIEIIMQRRGGNDFVEAHEEWLPTVSSAPEVISMTFVPIASLLNGVAGSGYLSHAINLYIRYKPPIEEIQQFLEFQIPRQWTPGYDLPLGPQRKEPLGPALQFSFLGPKLHISTNEVTVGHRPVTGLRLCLGGKKFNRLSLHLQHLATVPKNLQPYWNTSSSNEAPVWKEPDEKNDRWFEPVQWKGFAHVTTIPMEIEPHSKGTACAYIVTGAQLQVWELETKKVLFLRLLFSKIHGCSIRRSIWDHVASSFPQKPALFSQLGLSTSMSSNQQAMPTPFSLNSAVFPGGPPAPAPNAKLLKFVNTTEMTKGAQDLPGHWLVTGAKLDVENGKISLGVKYSLLHY

SEQ ID NO: 965 - protein, 419 aa, Platycerium bifurcatum
MGGKDVIYIRQQAQSQLSPFEIQKNLKKIGDLKFHGSRESNYTLNKEVISASTSKNFVQHLPVSNTYDSISFVSQKDIEIIKQRRGGDKFVEAHEDWVTTISSAPEVISMTFVPITSLLSGVLGSGFLSHAINLYMRYKPPIEEIQHFLEFQIPRQWTPGYDLPLGPPRKEPLGPALQFSFLGPKLHISTNQVAVGHRPVTGLRLCLGGKKFNRLSLHLQHLSTLPKSLQPYWKTSLSSEARLWKEPEDQNSRWFEPVQWKGFSHVTTAPVELEANATDTAFAYVVIGAQLQVWELDSKKVLFLRLLFFKIQGCSIRRSAWDHMPSLSQKSGLLSQLGLSTSMSSNQHAISTPFVQNSAVFPGGPPAPAPNAKLLKFVNITEMTKGAQDLPGHWLVTGAKLDVENGKISLGVKYSLLHY

SEQ ID NO: 966 - protein, 505 aa, Huperzia nummarifolia
MFNFRGPWHIDAQATKSLSLDGWFVTLYKMQIAKTPLVLCEEVKQAVPSSWDAAALANFIVKYGTHIVLSVKMGGKDAIYIRQQASSHLSPLEVQKYLKKIGDQKFRESKEPKEILNKEVTSVPTTMNLAQHLQFAKTYHSISFTSKKDIEIIMQRRGGNDFVEAHEEWLPTVSSAPEVISMTFVPIASLLNGVAGSGYLSHAINLYIRYKPPIEEIQQFLEFQIPRQWTPGYDLPLGPQRKEPLGPALQFSFLGPKLHISTNEVSVGLRPVTGLRLYLGGKKFNRLSLHLQHLSTLPKSLQPYWKTSLSSEARLWKEPEDQNSRWFEPVQWKGFSHVTTAPVELEANATDTAFAYVVIGAQLQVWELDSKKVLFLRLLFFKIQGCSIRRSAWDHMPSLSQKSGLLSQLGLSTSMSSNQHAISTPFVQNSAVFPGGPPAPAPNAKLLKFVNITEMTKGAQDLPGHWLVTGAKLDVENGREWKNIPWCEIFTSTLLSFWKKKLAIR

SEQ ID NO: 967 - protein, 603 aa, Huperzia carinata
MDKRTVVYPTTREKGLEAVRALGRGYDVTLDLKLGYCKGSPKSCLIQLDNQNVHDIVVPGGFTLFNVSKDISCDKGERTRFRSDVLNFHEMSERFNQGLSINARIPLGLFNSMFNFRGPWHIDAQATKSLSLDGWFVTLYRMQIAKTPLVLCDEVKQAVPSSWDAAALANFIVKYGTHIVLSVKMGGKDAIYIRQQASSQLSPLEVQKYLKKIGDQRFRESREPKDIINKEATSTPTSMNLAQHLQIAKTYHSISFTSKKDIEIIMQRRGGNDFVEAHEEWLPTVSSAPEVISMTFVPIASLLNGVAGSGYLSHAINLYIRYKPPIEEIQQFLEFQIPRQWTPGYDLPLGPQRKEPLGPALQFSFLGPKLHISTNEVSVGLRPVTGLRLYLGGKKFNRLSLHLQHLATVPKNLQAYWNTSSSNEAPVWKEPDEKNDRWFEPVQWKGFSHVTTIPMEIEPHSKGAACAFIVTGAQLQVWELDSKKVLFLRLLFFKIQGCSIRRSAWDHMPSLSQKSGLLSQLGLSTSMSSNQHAISTPFVQNSAVFPGGPPAPAPNAKLLKFVNITEMTKGAQDLPGHWLVTGAKLDVENGKISLGVKYSLLHY

SEQ ID NO: 968 - protein, 517 aa, Platycerium bifurcatum
MRCRRDSIKVFLSMVNGRMPLGLFNSMFNYNGPWHVDAQTTKSLALDGWFITLYKMQITTTSLVLRDEVKQAVPSTWDAAALANFIEKYGTHIVLSVKMGGKDAIYIRQQASSHLSPLEVQKYLKKIGDQKFRESKEPKEILNKEVTSVPTTMNLAQHLQFAKTYHSISFTSKKDIEIIMQRRGGNDFVEAHEEWLPTVSSAPEVISMTFVPIASLLNGVAGSGYLSHAINLYIRYKPPIEEIQQFLEFQIPRQWTPGYDLPLGPQRKEPLGPALQFSFLGPKLHISTNEVSVGLRPVTGLRLYLGGKKFNRLSLHLQHLSTLPKSLQPYWKTSLSSEARLWKEPEDQNSRWFEPVQWKGFSHVTTAPVELEANATDTAFAYVVIGAQLQVWELDSKKVLFLRLLFFKIQGCSIRRSAWDHMPSLSQKSGLLSQLGLSTSMSSNQHAISTPFVQNSAVFPGGPPAPAPNAKLLKFVNITEMTKGAQDLPGHWLVTGAKLDVENGKISLGVKYSLLHY

SEQ ID NO: 969 - protein, 605 aa, Huperzia carinata
MDKRAVLNSTVQSKAIEAVGALGRGYDVTLDLKLGYCKGSPESCLIELDKQHFHDIVVPGDFTLFNVSKDITCDKGERTRFRSDVLNFHEMSERFNQGLSINARIPLGLFNSMFNFRGPWHIDAQATKSLSLDGWFVTLYNMQVSRTSLVLCDEVKQAVPSSWDAAALASFIEKYGTHIVLSVKMGGKDAIYIRQQASSQLSPLEVQKYLKKIGDQRFRESREPKDIINKEATSTPTSMNLAQHLQIAKTYHSISFVSKKDIEIIKQRRGGSDFVKSHEEWLTTVSSAPEVISMTFVPIASLLNGVAGSGYLSHAINLYIRYKPPIEEIQQFLEFQIPRQWTPGYDLPLGPQRKEPLGPALQFSFLGPKLHISTNEVSVGLRPVTGLRLYLGGKKFNRLSLHLQHLATLPKTLQPYWKTSLSGEARLWKEPEEQNSRWFEPVQWKGFSHVTTAPIELEPCATDTAFAYVVIGAQLQVWELDSKKVLFLRLLFFKIQGCSIRRSAWDHMPSLSQKKSGILSQLGLSSTSMSSNKHAMSTPFVQNSAVFPGGPPAPAPNAKLLKFVNITEMTKGAQDLPGHWLVTGAKLDVENGKISLGVKYSLLHY

SEQ ID NO: 970 - protein, 463 aa, Huperzia carinata
MQITMTSLVLRDEVKQAVPSTWDAAALANFIEKYGTHIVLSVKMGGKDVIYIRQQAQSQLSPFEIQKNLKNIGDLKFHGSRESSYTLNKEVISASTSKNFVQHLPVSNTYDSISFVSQKDIEIIKQRRGGDKFVEAHEDWVTTISSAPEVISMTFVPITSLLSGVLGSGFLSHAINLYMRYKPPIEEIQHFLEFQIPRQWTPGYDLPLGPPRKEPLGPALQFSFLGPKLRISTNQVTVGHKPVTGLRLCLGGKKLNRLSLHLQHLATVPKNLQAYWNTSSSNEAPVWKEPDEKNDRWFEPVQWKGFSHVTTIPMEIEPHSKGAACAFIVTGAQLQVWELETKKVLFLRVLFSKIHGCSIRRSIWDHVASSFPQKPALFSQLGLSTSMSSNQQAMPTPFSLNSAVFPDGPPAPAPNAKLLKFVNTTEMTKGAKDLPGHWLVTGAKLDVENGKISLGVKYSLLHY

SEQ ID NO: 971 - protein, 435 aa, Huperzia tetratoides
MSHDIVVPGDFTLFNVSKDITCDKGERTRFRSDVLSFHEMSERFNQGLSINARIPLGLFNSMFNFRGPWHIDAQATKSLSLDGWFVTLYKMQVSRTSMVLCDEVKQAVPSSWDAAALASFIEKYGTHIVLSVKMGGKDAIYIRQQASSHLSPLEVQKYLKKIGDQRFRESREPKDILNKEVRSAPTTMNLAQHLQFAKTYHSISFMSKKDIEIIMQRRGGNDFVEAHEEWLPTVSSAPEVISMTFVPIASLLNGVAGSGYLSHAINLYIRYKPPIEEIQQFLEFQIPRQWTPGYDLPLGPQRKEPLGPALQFSFLGPKLHISTNQVSVGLRPVTGLRLNLGGKKFNRLSLHLQHLATLPKTLQPYWKTSLSSEARLWKEPEEQNSRWFEPVQWKGFSHVTTAPVELEPSATDTAFAYVVIGAQLQVCWIRRKYYF

SEQ ID NO: 972 - protein, 404 aa, Platycerium bifurcatum
MGGKDAIYIRQQASSHLSPLEVQKYLKKIGDQKFRESKEPKEILNKEVTSVPTTMNLAQHLQFAKTYHSISFTSKKDIEIIMQRRGGNDFVEAHEEWLPTVSSAPEVISMTFVPIASLLNGVAGSGYLSHAINLYIRYKPPIEEIQHFLEFQIPRQWTPGYDLPLGPPRKEPLGPALQFSFLGPKLHISTNQVAVGHRPVTGLRLCLGGKKFNRLSLHLQHLSTLPKSLQPYWKTSLSSEARLWKEPEDQNSRWFEPVQWKGFSHVTTAPVELEANATDTAFAYVVIGAQLQVWELDSKKVLFLRLLFFKIQGCSIRRSAWDHMPSLSQKSGILSQLGLSSTSMSSNKHAVSTPHPCLRSPAFCHSWDSVHQCHQINMQYQHRLCKTQLYFLEDLLHLHPMQNC

SEQ ID NO: 973 - protein, 603 aa, Huperzia nummarifolia
MDKRTVVYPTTRDKGLEAVRALGRGYDVTLDLKLGYCKGSPKSCLIQLDNQNVHDIVVPGGFTLFNVSKDISCDKGERTRFRSDVLTFHEMSERFNQGLSINARIPLGLFNSMFNFRGPWHIDAQATKSLSLDGWFVTLYKMQIAKTPLVLCEEVKQAVPSSWDAAALANFIVKYGTHIVLSVKMGGKDAIYIRQQASSHLSPLEVQKYLKKIGDQKFRESKEPKEILNKEVTSVPTTMNLAQHLQFAKTYHSISFTSKKDIEIIMQRRGGNDFVEAHEEWLPTVSSAPEVISMTFVPIASLLNGVAGSGYLSHAINLYIRYKPPIEEIQQFLEFQIPRQWTPGYDLPLGPQRKEPLGPALQFSFLGPKLHISTNEVSVGLRPVTGLRLYLGGKKFNRLSLHLQHLATVPKNLQPYWNTSSSNEAPVWKEPDEKDDRWFEPVQWKGFAHVATIPMEIEPHSKGTACAYIVTGAQLQVWELDSKKVLFLRLLFFKIQGCSIRRSAWDHMPSLSQKSGLLSQLGLSTSMSSNQHAISTPFVQNSAVFPGGPPAPAPNAKLLKFVNITEMTKGAQDLPGHWLVTGAKLDVENGKISLGVKYSLLHY

SEQ ID NO: 974 - protein, 513 aa, Huperzia carriata (Philippines)
MSERFNQGLSINARIPLGLFNSMFNFRGPWHIDAQATKSLSLDGWFVTLYRMQITKTPLVLCDEVKQAVPSSWDAAALANFIVKYGTHIVLSVKMGGKDAIYIRQQASSQLSPLEVQKYLKKIGDQRFRESREPKDIINKEATSTPTSMNLAQHLQIAKTYNSISFVSKKDIEIIKQRRGGSDFVKSHEEWLTTVSSAPEVISMTFVPIASLLNGVAGSGYLSHAINLYIRYKPPIEEIQQFLEFQIPRQWTPGYDLPLGPQRKEPLGPALQFSFLGPKLHISTNEVSVGLRPVTGLRLYLGGKKFNRLSLHLQHLSTLPKSLQPYWKTSLSSEARLWKEPEDQSSRWFEPVQWKGFSHVTTAPVELEANATDTAFAYVVIGAQLQVWELDSKKVLFLRLLFFKIQGCSIRRSAWDHMPSLSQKSGLLSQLGLSTSMSSNQHAISTPFVQNSAVFPGGPPAPAPNAKLLKFVNTTEMTKGAKDLPGHWLVTGAKLDVENGKISLGVKYSLLHY

SEQ ID NO: 975 - protein, 603 aa, Huperzia nummulariifolia
MDKKAVSNSTVEAKALEAVGALGRGYDVTLDLKLSYCKGSPESCLIQLDKQHLHDIVVPGGFTLFNISKDITCDKGERTRFRSDVLSFNEMSERFNQGISINGRMPLGLFNSMFNYNGPWHVDAQTTKSLALDGWFITLYKMQITTTSLVLRDEVKQAVPSTWDAAALANFIEKYGTHIVLSVKMGGKDAIYIRQQASSHLSPLEVQKYLKKIGDQKFRESKEPKEILNKEVTSVPTTMNLAQHLQFAKTYHSISFTSKKDIEIIMQRRGGNDFVEAHEEWLPTVSSAPEVISMTFVPIASLLNGVAGSGYLSHAINLYIRYKPPIEEIQHFLEFQIPRQWTPGYDLPLGPQRKEPLGPALQFSFLGPKLHISTNEVSVGLRPVTGLRLYLGGKKFNRLSLHLQHLATVPKNLQPYWNTSSSNEAPVWKEPDEKNDRWFEPVQWKGFAHVATIPMEIEPHSKGTACAYIVTGAQLQVWELDSKKVLFLRLLFFKIQGCSIRRSAWDHMPSLSQKSGLLSQLGLSTSMSSNQHAISTPFVQNSAVFPGGPPAPAPNAKLLKFVNITEMTKGAQDLPGHWLVTGAKLDVENGKISLGVKYSLLHY

SEQ ID NO: 976 - protein, 603 aa, Huperzia carriata (Philippines)
MDKKAVSNSTVEAKALEAVGALGRGYDVTLDLKLSYCKGSPESCLLQLDKQHLHDIVVPGGFTLFNISKDITCDKGERTRFRSDVLSFNEMSERFNQGLSINARIPLGLFNSMFNFRGPWHIDAQATKSLSLDGWFVTLYRMQITKTPLVLCDEVKQAVPSSWDAAALANFIVKYGTHIVLSVKMGGKDAIYIRQQASSQLSPLEVQKYLKKIGDQKFRESKEPKEILNKEVTSAPTTMNLAQHLQFAKTYHSISFTSKKDIEIIMQRRGGNDFVEAHEEWLPTVSSAPEVISMTFVPIASLLNGVAGSGYLSHAINLYIRYKPPIEEIQQFLEFQIPRQWTPGYDLPLGPQRKEPLGPALQFSFLGPKLHISTNEVSVGLRPVTGLRLYLGGKKFNRLSLHLQHLSTLPKSLQPYWKTSLSSEARLWKEPEDQSSRWFEPVQWKGFSHVTTAPVELEANATDTAFAYVVIGAQLQVWELDSKKVLFLRLLFFKIQGCSIRRSAWDHMPSLSQKSGLLSQLGLSTSMSSNQHAISTPFVQNSAVFPGGPPAPAPNAKLLKFVNTTEMTKGAKDLPGHWLVTGAKLDVENGKISLGVKYSLLHY

SEQ ID NO: 977 - protein, 603 aa, Huperzia carriata (Solomon Islands)
MDNRAVLNSTVQSKAIEAVGALGRGYDVTLDLKLGYCKGSPESCLIELDKQHFHDIVVPGDFTLFNVSKDITCDKGERTRFRSDVLTFHEMSERFNQGLSINARIPLGLFNSMFNFRGPWHIDAQATKSLSLDGWFVTLYRMQIAKTPLVLCDEVKQAVPSSWDAAALANFIVKYGTHIVLSVKMGGKDVIYIRQQASSHLSPLEVQKYLKKIGDQRFRESREPKDTINKEATSTPTSMNLAQHLQIAKTYNSISFVSKKDIEIIKQRRGGSDFVKFHEEWLTTVSSAPEVISMTFVPIASLLNGVVGSGYLSHAINLYIRYKPPIEEIQQFLEFQIPRQWTPGYDLPLGPQRKEPLGPALQFSFLGPKLHVSTNQVSVGLRPVTGLRLYLGGKKFNRLSLHLQHLSTLPKSLQPYWKTSLSSEARLWKEPEDQNSRWFEPVQWKGFSHVTTAPVELEGNATDTAFAYVVIGAQLQVWELDSKKVLFLRLLFLKIHGCSVRRSAWDHMPSLSQKSGLLSQLGLSTSMSSNQHAISTPFVQNSAVFPGGPPAPAPNAKLLKFVNITEMTKGAEDVPGHWLVTGAKLDVENGKISLGVKYSLLHY

SEQ ID NO: 978 - protein, 604 aa, Huperzia salvinioides
MDKKAVSNSTVEAKALEAVGALGRGYDVTLDLKLSYCKGSPESCLIQLDKQHLHDIVVPGGFTLFNISKDITCDKGERTRFRSDVLTFHEMSERFNQGLSINARIPLGLFNSMFNFRGPWHIDAQATKSLSLDGWFVTLYKMQIAKTPLVLCDEVKQAVPSSWDAAALANFIVKYGTHIVLSVKMGGKDAIYIRQQASSHVSPLEVQKYLKKIGDQKFRESKEPKEILNKEVTSATTTMNLAQHLQFAKTYHSISFTSKKDIEIIMQRRGGNDFVEAHEEWLPTVSSAPEVISMTFVPIASLLNGVAGSGYLSHAINLYIRYKPPIEEIQQFLEFQIPRQWTPGYDLPLGPQRKEPLGPALQFSFLGPKLHISTNEVSVGLRPVTGLRLYLGGKKFNRLSVHLQHLSTLPKSLQPYWKTSLSSEARLWKEPEDQNSRWFEPVQWKGFSHVTTAPVELEANATDTAFAYVVIGAQLQVWELDSKKVLFLRLLFLKIHGCSVRRSAWDHMPSLSQKSGILSQLGLSSTSMSSNKHAVSTPFVQNSAVFAGGPPAPAPNAKLLKFVNITEMTKGAQDLPGHWLVTGAKLDVENGKISLGVKYSLLHY

SEQ ID NO: 979 - protein, 557 aa, Huperzia nummarifolia
MDKRTVVYPTTRDKGLEAVRALGRGYDVTLDLKLGYCKGSPKSCLIQLDNQNVHDIVVPGGFTLFNVSKDISCDKGERTRFRSDVLSFNEMSERPWHVDAQTTKSLALDGWFITLYKMQITTTSLVLRDEVKQAVPSTWDAAALANFIEKYGTHIVLSVKMGGKDVIYIRQQAQSQLSPFEIQKNLKKIGDLKFHGSRESNYTLNKEVISASTSKNFVQHLPVSNTYDSISFVSQKDIEIIKQRRGGDKFVEAHEDWVTTISSAPEVISMTFVPITSLLSGVLGSGFLSHAINLYMRYKPPIEEIQHFLEFQIPRQWTPGYDLPLGPPRKEPLGPALQFSFLGPKLHISTNQVAVGHRPVTGLRLCLGGKKFNRLSLHLQHLSTLPKSLQPYWKTSLSSEARLWKEPEDQNSRWFEPVQWKGFSHVTTAPVELEANATDTAFAYVVIGAQLQVWELDSKKVLFLRLLFFKIQGCSIRRSAWDHMPSLSQKSGLLSQLGLSTSMSSNQHAISTPFVQNSAVFPGGPPAPAPNAKLLKFVNITEMTKGAQDLIKVCEHH

SEQ ID NO: 980 - protein, 514 aa, Huperzia tetratoides
MSERFNQGLSINARIPLGLFNSMFNYNGPWHVDAQTTKSLALDGWFITLYKMQITKTSLVLRDEVKQEVPSAWDAAALANFIEKYGTHIVLSVKMGGKDVIYIRQQALSQLSPFEIQKNLKKIGDLSFHGSRESNHTLNKEVISASTSKHFAQHLPISHTYDSISFVSQKDIEIIEQRRGGDKFVKAHEDWVTTISSAPEVISMTFVPITSLLSGVLGSGFLSHAINLYMRYKPPVEEIQHFLEFQIPRQWTPGYDLPLGPPRKEPLGPALQFSFLGPKLYISTNQVTVGQRPVTGLRLCLGGKKFNRLSLHLQHLATVPKNLQPYWNTSSSSEAPVWKEPEEKSDRWFEPVQWKGFSHVATLPVEIEPHSKGTARAYIVTGAQLQVWELDTKKVLFLRLLFSKIHGCSIRRSIWDHVASSFSQKPALFSQLGLSTSMPSNQQAMPTPFSLNSAVFPGGPPAPAPNAKLLKFVNITEMTKGAQDLPGHWLVTGAKLDVENGKISLAVKYSLLHY

SEQ ID NO: 981 - protein, 603 aa, Platycerium bifurcatum
MDKKAVSNSTVEAKALEAVGALGRGYDVTLDLKLSYCKGSPESCLIQLDKQHLHDIVVPGGFTLFNISKDITCDKGERTRFRSDVLSFNEMSERFNQGISINGRMPLGLFNSMFNFRGPWHIDAQATKSLSLDGWFVTLYKMQIAKTPLVLCEEVKQAVPSSWDAAALANFIVKYGTHIVLSVKMGGKDAIYIRQQASSHLSPLEVQKYLKKIGDQKFRESKEPKEILNKEVTSVPTTMNLAQHLQFAKTYHSISFTSKKDIEIIMQRRGGNDFVEAHEEWLPTVSSAPEVISMTFVPIASLLNGVAGSGYLSHAINLYIRYKPPIEEIQQFLEFQIPRQWTPGYDLPLGPQRKEPLGPALQFSFLGPKLHISTNEVSVGLRPVTGLRLYLGGKKFNRLSLHLQHLATVPKNLQPYWNTSSSNEAPVWKEPDEKNDRWFEPVQWKGFAHVATIPMEIEPHSKGTACAYIVTGAQLQVWELDSKKVLFLRLLFFKIQGCSIRRSAWDHMPSLSQKSGLLSQLGLSTSMSSNQHAISTPFVQNSAVFPGGPPAPAPNAKLLKFVNITEMTKGAQDLPGHWLVTGAKLDVENGKISLGVKYSLLHY

SEQ ID NO: 982 - protein, 603 aa, Huperzia salvinioides
MDKRAVLNSTVQSKAIEAVGALGRGYDVTLDLKLGYCKGSPESCLIELDKQHFHDIVVPGDFTLFNVSKDITCDKGERTRFRSDVLTFHEMSERFNQGLSINARIPLGLFNSMFNFRGPWHIDAQATKSLSLDGWFVTLYKMQIAKTPLVLCDEVKQAVPSSWDAAALANFIVKYGTHIVLSVKMGGKDAIYIRQQASSHVSPLEVQKYLKKIGDQKFRESKEPKEILNKEVTSATTTMNLAQHLQFAKTYHSISFTSKKDIEIIMQRRGGNDFVEAHEEWLPTVSSAPEVISMTFVPIASLLNGVAGSGYLSHAINLYIRYKPPIEEIQQFLEFQIPRQWTPGYDLPLGPQRKEPLGPALQFSFLGPKLHISTNEVSVGLRPVTGLRLYLGGKKFNRLSVHLQHLSTLPKSLQPYWKTSLSSEARLWKEPEDQNSRWFEPVQWKGFSHVTTAPVELEANATDTAFAYVVIGAQLQVWELDSKKVLFLRLLFLKIHGCSIRRSAWDHMPTLSQKSGLLSQLGLSTSMSSNQHAISTPFVQNSAVFPGGPPAPAPNAKLLKFVNITEMTKGAQDLPGHWLVTGAKLDVENGKISLGVKYSLLHY

SEQ ID NO: 983 - protein, 409 aa, Huperzia carinata
MSERFNQGLSINARIPLGLFNSMFNFRGPWHIDAQATKSLSLDGWFVTLYRMQIAKTPLVLCDEVKQAVPSSWDAAALANFIVKYGTHIVLSVKMGGKDAIYIRQQASSQLSPLEVQKYLKKIGDQKFRESKEPKEILNKEVTSAPTTMNLAQHLQFAKTYHSISFTSKKDIEIIMQRRGGNDFVEAHEEWLPTVSSAPEVISMTFVPIASLLNGVAGSGYLSHAINLYIRYKPPIEEIQQFLEFQIPRQWTPGYDLPLGPQRKEPLGPALQFSFLGPKLHISTNEVSVGLRPVTGLRLYLGGKKFNRLSLHLQHLSTLPKSLQPYWKTSLSSEARLWKEPEDQNSRWFEPVQWKGFSHVTTAPVELEANATDTAFAYVVIGAQLQVWSTAASLGAGFKEGAISETLVL

SEQ ID NO: 984 - protein, 603 aa, Huperzia nummarifolia
MDKRTVVYPTTRDKGLEAVRALGRGYDVTLDLKLGYCKGSPKSCLIQLDNQNVHDIVVPGGFTLFNVSKDISCDKGERTRFRSDVLTFHEMSERFNQGLSINARIPLGLFNSMFNFRGPWHIDAQATKSLSLDGWFVTLYKMQIAKTPLVLCEEVKQAVPSSWDAAALANFIVKYGTHIVLSVKMGGKDVIYIRQQAQSQLSPFEIQKNLKKIGDLKFHGSRESNYTLNKEVISASTSKNFVQHLPVSNTYDSISFVSQKDIEIIKQRRGGDKFVEAHEDWVTTISSAPEVISMTFVPITSLLSGVLGSGFLSHAINLYMRYKPPIEEIQQFLEFQIPRQWTPGYDLPLGPQRKEPLGPALQFSFLGPKLHISTNEVSVGLRPVTGLRLYLGGKKFNRLSLHLQHLATVPKNLQPYWNTSSSNEAPVWKEPDEKDDRWFEPVQWKGFAHVATIPMEIEPHSKGTACAYIVTGAQLQVWELDSKKVLFLRLLFFKIQGCSIRRSAWDHMPSLSQKSGLLSQLGLSTSMSSNQHAISTPFVQNSAVFPGGPPAPAPNAKLLKFVNITEMTKGAQDLPGHWLVTGAKLDVENGKISLGVKYSLLHY

SEQ ID NO: 985 - protein, 588 aa, Platycerium bifurcatum
MDKRTVVYPTTREKGLEAVRALGRGYDVTLDLKLGYCKGSPQSCLIQLDNQNVHDIVVPGGFTLFNVSNDISCDKGERTRFRSDVLSFNEMSERFNQGISINGRMPLGLFNSMFNFRGPWHIDAQATKSLSLDGWFVTLYKMQIAKTPLVLCEEVKQAVPSSWDAAALANFIVKYGTHIVLSVKMGGKDAIYIRQQASSHLSPLEVQKYLKKIGDQKFRESKEPKEILNKEVTSVPTTMNLAQHLQFAKTYHSISFTSKKDIEIIMQRRGGNDFVEAHEEWLPTVSSAPEVISMTFVPIASLLNGVAGSGYLSHAINLYIRYKPPIEEIQQFLEFQIPRQWTPGYDLPLGPQRKEPLGPALQFSFLGPKLHISTNEVSVGLRPVTGLRLYLGGKKFNRLSLHLQHLATVPKNLQPYWNTSSSNEAPVWKEPDEKNDRWFEPVQWKGFAHVATIPMEIEPHSKGTACAYIVTGAQLQVWELDSKKVLFLRLLFFKIQGCSIRRSAWDHMPSLSQKSGILSQLGLSSTSMSSNKHAVSTPHPCLRSPAFCHSWDSVHQCHQINMQYQHRLCKTQLYFLEDLLHLHPMQNC

SEQ ID NO: 986 - protein, 603 aa, Platycerium bifurcatum
MDKRTVVYPTTREKGLEAVRALGRGYDVTLDLKLGYCKGSPQSCLIQLDNQNVHDIVVPGGFTLFNVSNDISCDKGERTRFRSDVLSFNEMSERFNQGISINGRMPLGLFNSMFNFRGPWHIDAQATKSLSLDGWFVTLYKMQIAKTPLVLCEEVKQAVPSSWDAAALANFIVKYGTHIVLSVKMGGKDAIYIRQQASSHLSPLEVQKYLKKIGDQKFRESKEPKEILNKEVTSVPTTMNLAQHLQFAKTYHSISFTSKKDIEIIMQRRGGNDFVEAHEEWLPTVSSAPEVISMTFVPIASLLNGVAGSGYLSHAINLYIRYKPPIEEIQQFLEFQIPRQWTPGYDLPLGPQRKEPLGPALQFSFLGPKLHISTNEVSVGLRPVTGLRLYLGGKKFNRLSLHLQHLATVPKNLQPYWNTSSSNEAPVWKEPDEKNDRWFEPVQWKGFAHVATIPMEIEPHSKGTACAYIVTGAQLQVWELDSKKVLFLRLLFFKIQGCSIRRSAWDHMPSLSQKSGLLSQLGLSTSMSSNQHAISTPFVQNSAVFPGGPPAPAPNAKLLKFVNITEMTKGAQDLPGHWLVTGAKLDVENGKISLGVKYSLLHY

SEQ ID NO: 987 - protein, 607 aa, Huperzia carinata
MDKRTVVYPTTREKGLEAVRALGRGYDVTLDLKLGYCKGSPKSCLIQLDNQNVHDIVVPGGFTLFNVSKDISCDKGERTRFRSDVLNFHEMSERFNQGLSINARIPLGLFNSMFNYNGPWHVDAQTTKSLALDGWFITLYKMQITMTSLVLRDEVKQAVPSTWDAAALANFIEKYGTHIVLSVKMGGKDVIYIRQQAQSQLSPFEIQKNLKNIGDLKFHGSRESSYTLNKEVISASTSKNFVQHLPVSNTYDSISFVSQKDIEIIKQRRGGDKFVEAHEDWVTTISSAPEVISMTFVPITSLLSGVLGSGFLSHAINLYMRYKPPIEEIQHFLEFQIPRQWTPGYDLPLGPPRKEPLGPALQFSFLGPKLRISTNQVTVGHKPVTGLRLCLGGKKLNRLSLHLQHLSTLPKSLQPYWKTSLSSEARLWKEPEDQNSRWFEPVQWKGFSHVTTAPVELEANATDTAFAYVVIGAQLQVWELDSKKVLFLRLLFFKIQGCSIRRSAWDHMPSLSQMSQKSGILSQLGLSSTSMSSNKHAMSTPFVQNSAVFPGGPPAPAPNAKLLKFVNITEMTKGAQDLPGHWLVTGAKLDVENGKISLGVKYSLLHY

SEQ ID NO: 988 - protein, 604 aa, Huperzia carriata (Solomon Islands)
MDKKAVSNSTVEAKALEAVGALGRGYDVTLDLKLSYCKGSPESCLIQLDKQHLHDIVVPGGFTLFNISKDITCDKGERTRFRSDVLTFHEMSERFNQGLSINARIPLGLFNSMFNFRGPWHIDAQATKSLSLDGWFVTLYRMQIAKTPLVLCDEVKQAVPSSWDAAALANFIVKYGTHIVLSVKMGGKDVIYIRQQASSHLSPLEVQKYLKKIGDQRFRESREPKDTINKEATSTPTSMNLAQHLQIAKTYNSISFVSKKDIEIIKQRRGGSDFVKFHEEWLTTVSSAPEVISMTFVPIASLLNGVVGSGYLSHAINLYIRYKPPIEEIQQFLEFQIPRQWTPGYDLPLGPQRKEPLGPALQFSFLGPKLHVSTNQVSVGLRPVTGLRLYLGGKKFNRLSLHLQHLATLPKTLQPYWKTSLSGEARLWKEPEEQNSRWFEPVQWKGFSHVTTAPIELEPCATDTAFAYVVIGAQLQVWELDSKKVLFLRLLFLKIHGCSVRRSAWDHMPSLSQKSGILSQLGLSSTSMSSNKHPMSTPFVQNSAVFPGGPPAPAPNAKLLKFVNITEMTKGAEDVPGHWLVTGAKLDVENGKISLGVKYSLLHY

SEQ ID NO: 989 - protein, 603 aa, Huperzia nummulariifolia (Blume)
MDKRTVVYPTTREKGLDAVRALGRGYDVTLDLKLGYCKGSSKSCLIQLDNQNVHDIVVPGGFTLFNVSKDISCDKGERTRFRSDVLTFHEMSERFNQGLSINARIPLGLFNSMFNFRGPWHIDAQATKSLSLDGWFVTLYKMQIAKTPLVLCDEVKQAVPSSWDAAALANFIVKYGTHIVLSVKMGGKDAIYIRQQASSHVSPLEVQKYLKKIGDQKFRESKEPKEILNKEVTSATTTMNLAQHLQFAKTYHSISFTSKKDIEIIMQRRGGNDFVEAHEEWLPTVSSAPEVISMTFVPIASLLNGVAGSGYLSHAINLYIRYKPPIEEIQQFLEFQIPRQWTPGYDLPLGPQRKEPLGPALQFSFLGPKLHISTNEVSVGLRPVTGLRLYLGGKKFNRLSVHLQHLSTLPKSLQPYWKTSLSSEARLWKEPEDQNSRWFEPVQWKGFSHVTTAPVELEANATDTAFAYVVIGAQLQVWELDSKKVLFLRLLFLKIHGCSIRRSAWDHMPTLSQKSGLLSQLGLSTSMSSNQHAISTPFVQNSAVFPGGPPAPAPNAKLLKFVNITEMTKGAEDIPGHWLVTGAKLDVENGKISLGVKYSLLHY

SEQ ID NO: 990 - protein, 604 aa, Huperzia phlegmaria
MDKRTVVYLTTREKGLEAVRALGRGYDVTLDLKLGYCKGSPKSCLIQLDNQNVHDIVVPGGFTLSNVSKDISCDKGERTRFRSDVLSFNEMSERFNQGLSINARIPLGLFNSMFNYNGPWHVDAQTTKSLALDGWFITLYKMQITTTSLVLRDEVKQAVPSTWDAAALANFIEKYGTHIVLSVKMGGKDAIYIRQQAHSQLSPFEIQKNLKKIGDLKFHGSRESNYTLNKEVISASTSKNFAQHLPISNTYDSISFVSQKDIEIIKQRRGGDKFVEAHEDWITTISSAPEVISMTFVPITSLLSGVLGSGFLSHAINLYMRYKPPIEEIQHFLEFQIPRQWTPGYDLPLGPPRKEPLGPALQFSFLGPKLHISTNEVTVGHRPVTGLRLCLGGKKFNRLSLHLQHLATVPKNLQPYWNTSSSNEAPVWKEPDEKNDRWFEPVQWKGFAHVTTIPMEIEPHSKGTACAYIVTGAQLQVWELETKKVLFLRLLFSKIHGCSIRRSIWDHVASSFPQKPALFSQLGLSTSMSSNQQAMPTPFSLNSAVFPGGPPAPAPNAKLLKFVNTTEMTKGAQDLPGHWLVTGAKLDVENGKISLGVKYSLLHY

SEQ ID NO: 991 - protein, 463 aa, Huperzia carriata (Solomon Islands)
MQITTTSLVLRDEVKQAVPSTWDAAALANFIEKYGTHIVLSVKMGGKDVIYIRQQAQSQLSPFEIQKNLKKIGDLKFQGSRESSYTLNKEVISASTSKNFVQHLPVSNTYDSISFVSQKDIEIIKQRRGGDKFVEAHEDWVTTISSAPEVISMTFVPITSLLSGVLGSGFLSHAINLYMRYKPPIEEMQHFLEFQIPRQWTPGYDLPLGPPRKEPLGPALQFSFLGPKLHISTNQVTVGHRPVTGLRLCLGGKKFNRLSLHLQHLATVPKNLQAYWNTSSSNEAPVWKEPDEKNDRWFEPVQWKGFSHVTTIPMEIEPHSKGAACAFIVTGAQLQVWELETKKVLFLRVLFSKIHGCSIRRSIWDHVASSFPQKPALFSQLGLSTSMSSNQQAMPTPFSLNSAVFPDGPPAPAPNAKLLKFVNTTEMTKGAKDLPGHWLVTGAKLDVENGKISLGVKYSLLHY

SEQ ID NO: 992 - protein, 603 aa, Huperzia nummulariifolia (Blume)
MDKKAVSNSTVEAKALEAVGALGRGYDVTLDLKLSYCKGSPESCLIQLDKQHLHDIVVPGGFTLFNISKDITCDKGERTRFRSDVLTFHEMSERFNQGLSINARIPLGLFNSMFNFRGPWHIDAQATKSLSLDGWFVTLYKMQIAKTPLVLCDEVKQAVPSSWDAAALANFIVKYGTHIVLSVKMGGKDAIYIRQQASSHVSPLEVQKYLKKIGDQKFRESKEPKEILNKEVTSATTTMNLAQHLQFAKTYHSISFTSKKDIEIIMQRRGGNDFVEAHEEWLPTVSSAPEVISMTFVPIASLLNGVAGSGYLSHAINLYIRYKPPIEEIQQFLEFQIPRQWTPGYDLPLGPQRKEPLGPALQFSFLGPKLHISTNEVSVGLRPVTGLRLYLGGKKFNRLSVHLQHLSTLPKSLQPYWKTSLSSEARLWKEPEDQNSRWFEPVQWKGFSHVTTAPVELEANATDTAFAYVVIGAQLQVWELDSKKVLFLRLLFLKIHGCSIRRSAWDHMPTLSQKSGLLSQLGLSTSMSSNQHAISTPFVQNSAVFPGGPPAPAPNAKLLKFVNITEMTKGAEDIPGHWLVTGAKLDVENGKISLGVKYSLLHY

SEQ ID NO: 993 - protein, 579 aa, Huperzia nummarifolia
MDKRTVVYPTTRDKGLEAVRALGRGYDVTLDLKLGYCKGSPKSCLIQLDNQNVHDIVVPGGFTLFNVSKDISCDKGERTRFRSDVLSFNEMSERPWHVDAQTTKSLALDGWFITLYKMQITTTSLVLRDEVKQAVPSTWDAAALANFIEKYGTHIVLSVKMGGKDVIYIRQQAQSQLSPFEIQKNLKKIGDLKFHGSRESNYTLNKEVISASTSKNFVQHLPVSNTYDSISFVSQKDIEIIKQRRGGDKFVEAHEDWVTTISSAPEVISMTFVPITSLLSGVLGSGFLSHAINLYMRYKPPIEEIQHFLEFQIPRQWTPGYDLPLGPPRKEPLGPALQFSFLGPKLHISTNQVAVGHRPVTGLRLCLGGKKFNRLSLHLQHLSTLPKSLQPYWKTSLSSEARLWKEPEDQNSRWFEPVQWKGFSHVTTAPVELEANATDTAFAYVVIGAQLQVWELDSKKVLFLRLLFFKIQGCSIRRSAWDHMPSLSQKSGLLSQLGLSTSMSSNQHAISTPFVQNSAVFPGGPPAPAPNAKLLKFVNITEMTKGAQDLPGHWLVTGAKLDVENGKISLGVKYSLLHY

SEQ ID NO: 994 - protein, 607 aa, Huperzia nummarifolia
MDKKAVSNSTVEAKALEAVGALGRGYDRGYDVTLDLKLSYCKGSPESCLIQLDKQHLHDIVVPGGFTLFNISKDITCDKGERTRFRSDVLTFHEMSERFNQGLSINARIPLGLFNSMFNFRGPWHIDAQATKSLSLDGWFVTLYKMQIAKTPLVLCEEVKQAVPSSWDAAALANFIVKYGTHIVLSVKMGGKDAIYIRQQASSHLSPLEVQKYLKKIGDQKFRESKEPKEILNKEVTSVPTTMNLAQHLQFAKTYHSISFTSKKDIEIIMQRRGGNDFVEAHEEWLPTVSSAPEVISMTFVPIASLLNGVAGSGYLSHAINLYIRYKPPIEEIQQFLEFQIPRQWTPGYDLPLGPQRKEPLGPALQFSFLGPKLHISTNEVSVGLRPVTGLRLYLGGKKFNRLSLHLQHLSTLPKSLQPYWKTSLSSEARLWKEPEDQNSRWFEPVQWKGFSHVTTAPVELEANATDTAFAYVVIGAQLQVWELDSKKVLFLRLLFFKIQGCSIRRSAWDHMPSLSQKSGLLSQLGLSTSMSSNQHAISTPFVQNSAVFPGGPPAPAPNAKLLKFVNITEMTKGAQDLPGHWLVTGAKLDVENGKISLGVKYSLLHY

SEQ ID NO: 995 - protein, 640 aa, Huperzia squarrosa
MDKRAVLNSTVQSKAIEAVGALGRGYDVTLDLKLGYCKGSPESCLIELDKQHFHDIVVPGDFTLLNVSKDITCDKGERTRFRSDVLSFHEMSERFNQGTSINGRMPLGLFNSMFNFRGPWHIDAQATKSLSLDGWFVTLYKMQIAKTPLVLCDEVKQAVPSSWDAAALASFIVKYGTHIVLSVKMGDIVLSVKMGGKDVIYIRQQASSNLSPLEVQKYLKKIGDQRFRESREPTDILNKEVTSAPTTMNLAQHLQFAKTYHSISLTSKKDIEIIMQRRGGNDFVEAHEGWLQTVSSAPEVISMTFVPIASLLNGVAGSGYLSHAINLYIRYKPPIEEIQQFLEFQIPRQWTPGYDLPLGPQRKEPLGPALQFSFLGPTPGYDLPLGPQRKEPLGPALQFSFLGPKLHISTNQVSVGLRPVTGLRLYLGGKKFNRLSLHLQHLATLPKTLQPYWKTSLSSEARLWKEPEEQNSRWFEPVQWKGFSHVTTAPVELEPCATDTAFAYVVIGAQLQVWELDSKKVLFLRLLFLKIHGCSVRRSAWDHMPSLSQKSGLLSQLGLSSTSMSSNKHAASTPFVQNSAVFPGGPPALAPNAKLLKFVNITEMTKGAEDVPGHWLVTGAKLDVENGKISLGVKYSLLHY

SEQ ID NO: 996 - protein, 463 aa, Huperzia squarrosa
MQITTTSLVLRDEVKQEVPSAWDAAALANFIEKYGTHIVLSVKMGGKDVIYIRQQALSQLSPFEIQKNLKKIGDLSFHGSRESNHTLNKEVISASTSKNFAQHLPISHTYNSISFVSHKDIEIIEQRRGGDKFVKAHEDWVTTISSAPEVISMTFVPITSLLGGVLGSGFLSHAINLYMRYKPPIEEIQHFLEFQIPRQWTPGYDLPLGPPRKEPLGPALQFSFLGPKLYISTNQVTVGHRPVTGLRLCLGGKKFNRLSLHLQHLATVPKNLQPYWNTSSSNEAPVWKDPEEKSDRWFEPVQWKGFSHVATVPVEIEPHSKGTACAYIVTGAQLQVWELETKKVLFLRLLFSKIHGCSIRRSIWDHVASSFSQKPALFSQLGLSTSMSSNQQAMPTPFSLNSAVFPGGPPAPAPNAKLLKFVNITEMTKGAEDVPGHWLVTGAKLDVENGKISLGVKYSLLHY

SEQ ID NO: 997 - protein, 326 aa, Huperzia nummulariifolia (Blume)
MDKKAVSNSTVEAKALEAVGALGRGYDVTLDLKLSYCKGSPESCLIQLDKQHLHDIVVPGGFTLFNISKDITCDKGERTRFRSDVLTFHEMSERFNQGLSINARIPLGLFNSMFNFRGPWHIDAQATKSLSLDGWFVTLYKMQIAKTPLVLCDEVKQAVPSSWDAAALANFIVKYGTHIVLSVKMGGKDAIYIRQQASSHVSPLEVQKYLKKIGDQKFRESKEPKEILNKEVTSATTTMNLAQHLQFAKTYHSISFTSKKDIEIIMQRRGGNDFVEAHEEWLPTVSSAPEVISMTFVPIASLLNGVAGSGYLSHAINLCNQLIHSI

SEQ ID NO: 998 - protein, 604 aa, Platycerium bifurcatum
MDKRTVVYPTTREKGLEAVRALGRGYDVTLDLKLGYCKGSPQSCLIQLDNQNVHDIVVPGGFTLFNVSNDISCDKGERTRFRSDVLSFNEMSERFNQGISINGRMPLGLFNSMFNFRGPWHIDAQATKSLSLDGWFVTLYKMQIAKTPLVLCEEVKQAVPSSWDAAALANFIVKYGTHIVLSVKMGGKDAIYIRQQASSHLSPLEVQKYLKKIGDQKFRESKEPKEILNKEVTSVPTTMNLAQHLQFAKTYHSISFTSKKDIEIIMQRRGGNDFVEAHEEWLPTVSSAPEVISMTFVPIASLLNGVAGSGYLSHAINLYIRYKPPIEEIQQFLEFQIPRQWTPGYDLPLGPQRKEPLGPALQFSFLGPKLHISTNEVSVGLRPVTGLRLYLGGKKFNRLSLHLQHLATVPKNLQPYWNTSSSNEAPVWKEPDEKNDRWFEPVQWKGFAHVATIPMEIEPHSKGTACAYIVTGAQLQVWELETKKVLFLRLLFSKIHGCSIRRSIWDHVASSFPQKPALFSQLGLSTSMSSNQQAMPTPFSLNSAVFPGGPPAPAPNAKLLKFVNTTEMTKGAKDLPGHWLVTGAKLDVENGKISLGVKYSLLHY

SEQ ID NO: 999 - protein, 399 aa, Huperzia nummulariifolia (Blume)
MDKKAVSNSTVEAKALEAVGALGRGYDVTLDLKLSYCKGSPESCLIQLDKQHLHDIVVPGGFTLFNISKDITCDKGERTRFRSDVLTFHEMSERFNQGLSINARIPLGLFNSMFNFRGPWHIDAQATKSLSLDGWFVTLYKMQIAKTPLVLCDEVKQAVPSSWDAAALANFIVKYGTHIVLSVKMGGKDAIYIRQQASSHVSPLEVQKYLKKIGDQKFRESKEPKEILNKEVTSATTTMNLAQHLQFAKTYHSISFTSKKDIEIIMQRRGGNDFVEAHEEWLPTVSSAPEVISMTFVPIASLLNGVAGSGYLSHAINLYIRYKPPIEEIQQFLEFQIPRQWTPGYDLPLGPQRKEPLGPALQFSFLGPKLHISTNEVSVGLRSALGTSKKRASGSCFAV

SEQ ID NO: 1000 - protein, 603 aa, Huperzia nummarifolia
MDKRTVVYPTTRDKGLEAVRALGRGYDVTLDLKLGYCKGSPKSCLIQLDNQNVHDIVVPGGFTLFNVSKDISCDKGERTRFRSDVLTFHEMSERFNQGLSINARIPLGLFNSMFNFRGPWHIDAQATKSLSLDGWFVTLYKMQIAKTPLVLCEEVKQAVPSSWDAAALANFIVKYGTHIVLSVKMGGKDAIYIRQQASSHLSPLEVQKYLKKIGDQKFRESKEPKEILNKEVTSVPTTMNLAQHLQFAKTYHSISFTSKKDIEIIMQRRGGNDFVEAHEEWLPTVSSAPEVISMTFVPIASLLNGVAGSGYLSHAINLYIRYKPPIEEIQQFLEFQIPRQWTPGYDLPLGPQRKEPLGPALQFSFLGPKLHISTNEVSVGLRPVTGLRLYLGGKKFNRLSLHLQHLSTLPKSLQPYWKTSLSSEARLWKEPEDQNSRWFEPVQWKGFSHVTTAPVELEANATDTAFAYVVIGAQLQVWELDSKKVLFLRLLFFKIQGCSIRRSAWDHMPSLSQKSGLLSQLGLSTSMSSNQHAISTPFVQNSAVFPGGPPAPAPNAKLLKFVNITEMTKGAQDLPGHWLVTGAKLDVENGKISLGVKYSLLHY

SEQ ID NO: 1001 - protein, 416 aa, Selaginella biformis
MAQEKTSAYFTASEAVQALGKGFDTTLDLRLAGCKGPSGRLVELDETNREDLFVQDRVVIPNVSKDIRCDKGEFTHFRSEVLTFHQMSERFNQELSITGKMPLGLFNTMYSFNGPWQADASTTKSLALDGRFITSYKLQIVKSPLVLREEVKKAVPSSWDPAALAKFIDTYGTHIIVSVKVGGKDVVYVRQHQSSPLSPTELQKFIKRIADQKFAETNGSVSDSGNIKDKMQTPDLLAGSNHAHRLQLETFASSGGFTAKEDVEIIFRRRGGSNLLKSHNEWLKTVADAPDVISMTFVPITSLLNGVLGSGFLSHAVNLYLRHKPPIEDLQYFLEFQIPRQWSPGFDLPLGPQRKEPVCPAMQFSLMGPKLYVSTTQVSTKCFFSCFLCQLLLVSGDNRKKTCYRTTAFLGRQEMQ

SEQ ID NO: 1002 - protein, 604 aa, Huperzia phlegmaria
MDKRTVVYLTTREKGLEAVRALGRGYDVTLDLKLGYCKGSPKSCLIQLDNQNVHDIVVPGGFTLSNVSKDISCDKGERTRFRSDVLSFNEMSERFNQGLSINARIPLGLFNSMFNFRGPWHIDAQATKSLSLDGWFVTLYKMQIAKTPLVLCDEVKQAVPSSWDAAALANFIVKYGTHIVLSVKMGGKDAIYIRQQAHSQLSPFEIQKNLKKIGDLKFHGSRESNYTLNKEVISASTSKNFARHLPISNTYDSISFVSQKDIEIIKQRRGGDKFVEAHEDWITTISSAPEVISMTFVPITSLLSGVLGSGFLSHAINLYMRYKPPIEEIQHFLEFQIPRQWTPGYDLPLGPPRKEPLGPALQFSFLGPKLHISTNEVTVGHRPVTGLRLCLGGKKFNRLSLHLQHLATVPKNLQPYWNTSSSNEAPVWKEPDEKNDRWFEPVQWKGFAHVTTIPMEIEPHSKGTACAYIVTGAQLQVWELETKKVLFLRLLFSKIHGCSIRRSIWDHVASSFPQKPALFSQLGLSTSMSSNQQAMPTPFSLNSAVFPGGPPAPAPNAKLLKFVNTTEMTKGAQDLPGHWLVTGAKLDVENGKISLGVKYSLLHY

SEQ ID NO: 1003 - protein, 603 aa, Huperzia phlegmaria
MDKRTVVYLTTREKGLEAVRALGRGYDVTLDLKLGYCKGSPKSCLIQLDNQNVHDIVVPGGFTLSNVSKDISCDKGERTRFRSDVLSFNEMSERFNQGLSINARIPLGLFNSMFNYNGPWHVDAQTTKSLALDGWFITLYKMQITTTSLVLRDEVKQAVPSTWDAAALANFIEKYGTHIVLSVKMGGKDAIYIRQQASSHLSPLEVQKYLKKIGDQKFREFKEPKEILNKEVTSAPTTMNLAQHLQFAKTYHSISFTSKKDIEIIMQRRGGNDFVEAHEEWLPTVSSAPEVISMTFVPIASLLNGVAGSGYLSHAINLYIRYKPPIEEIQQFLEFQIPRQWTPGYDLPLGPQRKEPLGPALQFSFLGPKLHISTNEVSVGLRPVTGLRLYLGGKKFNRLSLHLQHLSTLPKSLQPYWKTSLSSEARLWKEPEDQNSRWFEPVQWKGFSHVTTAPVELEANATDTAFAYVVIGAQLQVWELDSKKVLFLRLLFLKIHGCSIRRSAWDHMPTLSQKSGLLSQLGLSTSMSSNQHAISTPFVQNSAVFPGGPPAPAPNAKLLKFVNITEMTKGAQDLPGHWLVTGAKLDVENGKISLGVKYSLLHY

SEQ ID NO: 1004 - protein, 604 aa, Huperzia carinata
MDKRTVVYPTTREKGLEAVRALGRGYDVTLDLKLGYCKGSPKSCLIQLDNQNVHDIVVPGGFTLFNVSKDISCDKGERTRFRSDVLNFHEMSERFNQGLSINARIPLGLFNSMFNYNGPWHVDAQTTKSLALDGWFITLYKMQITMTSLVLRDEVKQAVPSTWDAAALANFIEKYGTHIVLSVKMGGKDAIYIRQQASSQLSPLEVQKYLKKIGDQRFRESREPKDIINKEATSTPTSMNLAQHLQIAKTYHSISFVSKKDIEIIKQRRGGSDFVKSHEEWLTTVSSAPEVISMTFVPIASLLNGVAGSGYLSHAINLYIRYKPPIEEIQQFLEFQIPRQWTPGYDLPLGPQRKEPLGPALQFSFLGPKLHISTNEVSVGLRPVTGLRLYLGGKKFNRLSLHLQHLATVPKNLQAYWNTSSSNEAPVWKEPDEKNDRWFEPVQWKGFSHVTTIPMEIEPHSKGAACAFIVTGAQLQVWELETKKVLFLRVLFSKIHGCSIRRSIWDHVASSFPQKPALFSQLGLSTSMSSNQQAMPTPFSLNSAVFPDGPPAPAPNAKLLKFVNTTEMTKGAKDLPGHWLVTGAKLDVENGKISLGVKYSLLHY

SEQ ID NO: 1005 - protein, 513 aa, Huperzia carriata (Philippines)
MSERFNQGLSINARIPLGLFNSMFNFRGPWHIDAQATKSLSLDGWFVTLYRMQITKTPLVLCDEVKQAVPSSWDAAALANFIVKYGTHIVLSVKMGGKDVIYIRQEAQSQLSPFEIQKNLKNIGDLKFHGSRESSYTLNKEVISASTSKNFVEHLPVSNTYDSISFVSQKDIEIIKQRRGGDKFVEAHEDWVTTISSAPEVISMTFVPITSLLSGVLGSGFLSHAINLYMRYKPPIEEIQHFLEFQIPRQWTPGYDLPLGPPRKEPLGPALQFSFLGPKLRISTNQVTVGHKPVTGLRLCLGGKKLNRLSLHLQHLSTLPKSLQPYWKTSLSSEARLWKEPEDQSSRWFEPVQWKGFSHVTTAPVELEANATDTAFAYVVIGAQLQVWELDSKKVLFLRLLFFKIQGCSIRRSAWDHMPSLSQKSGLLSQLGLSTSMSSNQHAISTPFVQNSAVFPGGPPAPAPNAKLLKFVNTTEMTKGAKDLPGHWLVTGAKLDVEDGKISLGVKYSLLHY

SEQ ID NO: 1006 - protein, 435 aa, Huperzia carriata (Philippines)
MDKKAVSNSTVEAKALEAVGALGRGYDVTLDLKLSYCKGSPESCLLQLDKQHLHDIVVPGGFTLFNISKDITCDKGERTRFRSDVLSFNEMSERFNQGLSINARIPLGLFNSMFNFRGPWHIDAQATKSLSLDGWFVTLYRMQITKTPLVLCDEVKQAVPSSWDAAALANFIVKYGTHIVLSVKMGGKDAIYIRQQASSQLSPLEVQKYLKKIGDQRFRESREPKDIINKEATSTPTSMNLAQHLQIAKTYNSISFVSKKDIEIIKQRRGGSDFVKSHEEWLTTVSSAPEVISMTFVPIASLLNGVAGSGYLSHAINLYIRYKPPIEEIQQFLEFQIPRQWTPGYDLPLKKFNRLSLHLQHLATLPKTLQPYWKTSLSGEARLWKEPEEQNSRWFEPVQWKGFSHVTTAPIELEPCATDTAFAYVVIGAQLQVWE

SEQ ID NO: 1007 - protein, 604 aa, Huperzia salvinioides
MDKKAVSNSTVEAKALEAVGALGRGYDVTLDLKLSYCKGSPESCLIQLDKQHLHDIVVPGGFTLFNISKDITCDKGERTRFRSDVLTFHEMSERFNQGLSINARIPLGLFNSMFNFRGPWHIDAQATKSLSLDGWFVTLYKMQIAKTPLVLCDEVKQAVPSSWDAAALANFIVKYGTHIVLSVKMGGKDAIYIRQQASSHVSPLEVQKYLKKIGDQRFRESREPKDIINKEATSTPTSMNLAQHLQIAKTYHSISFVSKKDIEIIKQRRGGSDFVKSHEQWLTTVSSAPEVISMTFVPIASLLNGVAGSGYLSHAINLYIRYKPPIEEIQQFLEFQIPRQWTPGYDLPLGPQRKEPLGPALQFSFLGPKLHISTNEVSVGLRPVTGLRLYLGGKKFNRLSVHLQHLSTLPKSLQPYWKTSLSSEARLWKEPEDQNSRWFEPVQWKGFSHVTTAPVELEANATDTAFAYVVIGAQLQVWELDSKKVLFLRLLFLKIHGCSVRRSAWDHMPSLSQKSGILSQLGLSSTSMSSNKHAVSTPFVQNSAVFAGGPPAPAPNAKLLKFVNITEMTKGAQDLPGHWLVTGAKLDVENGKISLGVKYSLLHY

SEQ ID NO: 1008 - protein, 512 aa, Selaginella pallescens
MSERFNQELSITGKMPLGLFNHMYSFNGPWQADASSTKSLALDGRFITSYKLQIAKSPLVLRDEVKRAVPASWDPAALAKFIDTYGTHVIVSIKVGGKDVLYVRQHQSSPLSTTELQKLIKRFADQRFADTNGSVSDPRNVKNKMQPDLLAGRLPIESDTITAKEDEIIFRRRGGSNLLRNHNEWLKTVAEAPDVISMTFVPITSLLNGVLGSGFLSHAVNLYLRHKPPIEDLQYFLEFQIPRQWSPGFDLPLGPQRKEPVCPAMQFSLMGPKLYVSTAQVTIGRRPVTGLRLFLEGKKCNRLGIHLQHLSSLPKILQPHWDSNVPIGPPVWKGPEEQDSKWFEPVQWKSFSHVSTQPVEFLEESYVGQTSGTYIVTGGQLGVWDFGMKKVLFLRLLFSRVPGCAIRRTIWDHSPTTSQKSGLFSQLGLSSTFSGAQKAAAAKPAPVVLNSAVYPGGPPVPVPSRKLLKYVDITEMTKGAHDMPGHWIVTGAKLDVDRGRIALRLKYSLLHY

SEQ ID NO: 1009 - protein, 603 aa, Huperzia nummulariifolia
MDKRTVVYPTTREKGLEAVRALGRGYDVTLDLKLGYCKGSPQSCLIQLDNQNVHDIVVPGGFTLFNVSNDISCDKGERTRFRSDVLSFNEMSERFNQGISINGRMPLGLFNSMFNFRGPWHIDAQATKSLSLDGWFVTLYKMQIAKTPLVLCEEVKQAVPSSWDAAALANFIVKYGTHIVLSVKMGGKDAIYIRQQASSHLSPLEVQKYLKKIGDQKFRESKEPKEILNKEVTSVPTTMNLAQHLQFAKTYHSISFTSKKDIEIIMQRRGGNDFVEAHEEWLPTVSSAPEVISMTFVPIASLLNGVAGSGYLSHAINLYIRYKPPIEEIQHFLEFQIPRQWTPGYDLPLGPQRKEPLGPALQFSFLGPKLHISTNEVSVGLRPVTGLRLYLGGKKFNRLSLHLQHLATVPKNLQPYWNTSSSNEAPVWKEPDEKNDRWFEPVQWKGFAHVATIPMEIEPHSKGTACAYIVTGAQLQVWELDSKKVLFLRLLFFKIQGCSIRRSAWDHMPSLSQKSGLLSQLGLSTSMSSNQHAISTPFVQNSAVFPGGPPAPAPNAKLLKFVNITEMTKGAQDLPGHWLVTGAKLDVENGKISLGVKYSLLHY

SEQ ID NO: 1010 - protein, 603 aa, Huperzia salvinioides
MDKRTVVYPTTREKGVDAVRALGRGYDVTLDLKLGYCKGSSKSCLIQLDNQNVHDIVVPGGFTLFNVSKDISCDKGERTRFRSDVLTFHEMSERFNQGLSINARIPLGLFNSMFNFRGPWHIDAQATKSLSLDGWFVTLYKMQIAKTPLVLCDEVKQAVPSSWDAAALANFIVKYGTHIVLSVKMGGKDAIYIRQQASSHVSPLEVQKYLKKIGDQKFRESKEPKEILNKEVTSATTTMNLAQHLQFAKTYHSISFTSKKDIEIIMQRRGGNDFVEAHEEWLPTVSSAPEVISMTFVPIASLLNGVAGSGYLSHAINLYIRYKPPIEEIQQFLEFQIPRQWTPGYDLPLGPQRKEPLGPALQFSFLGPKLHISTNEVSVGLRPVTGLRLYLGGKKFNRLSVHLQHLSTLPKSLQPYWKTSLSSEARLWKEPEDQNSRWFEPVQWKGFSHVTTAPVELEANATDTAFAYVVIGAQLQVWELDSKKVLFLRLLFLKIHGCSIRRSAWDHMPTLSQKSGLLSQLGLSTSMSSNQHAISTPFVQNSAVFPGGPPAPAPNAKLLKFVNITEMTKGAQDLPGHWLVTGAKLDVENGKISLGVKYSLLHY

SEQ ID NO: 1011 - protein, 604 aa, Huperzia phlegmaria
MDKKAVSNSTVEAKALEAVGALGRGYDVTLDLKLSYCKGSPESCLIQLDKQNLHDIVVPGGFTLFNISKDITCDKGERTRFRSDVLTFHEMSERFNQGLSINARIPLGLFNSMFNFRGPWHIDAQATKSLSLDGWFVTLYKMQIAKTPLVLCDEVKQAVPSSWDAAALANFIVKYGTHIVLSVKMGGKDAIYIRQQASSHLSPLEVQKYLKKIGDQKFREFKEPKEILNKEVTSAPTTMNLAQHLQFAKTYHSISFTSKKDIEIIMQRRGGNDFVEAHEEWLPTVSSAPEVISMTFVPIASLLNGVAGSGYLSHAINLYIRYKPPIEEIQQFLEFQIPRQWTPGYDLPLGPQRKEPLGPALQFSFLGPKLHISTNEVTVGHRPVTGLRLCLGGKKFNRLSLHLQHLATVPKNLQPYWNTSSSNEAPVWKEPDEKNDRWFEPVQWKGFAHVTTIPMEIEPHSKGTACAYIVTGAQLQVWELETKKVLFLRLLFSKIHGCSIRRSIWDHVASSFPQKPALFSQLGLSTSMSSNQQAMPTPFSLNSAVFPGGPPAPAPNAKLLKFVNTTEMTKGAQDLPGHWLVTGAKLDVENGKISLGVKYSLLHY

SEQ ID NO: 1012 - protein, 513 aa, Huperzia carriata (Philippines)
MSERFNQGLSINARIPLGLFNSMFNFRGPWHIDAQATKSLSLDGWFVTLYNMQVSRTSLVLCDEVKQAVPSSWDAAALASFIEKYGTHIVLSVKMGGKDAIYIRQQASSQLSPLEVQKYLKKIGDQKFRESKEPKEILNKEVTSAPTTMNLAQHLQFAKTYHSISFTSKKDIEIIMQRRGGNDFVEAHEEWLPTVSSAPEVISMTFVPIASLLNGVAGSGYLSHAINLYIRYKPPIEEIQQFLEFQIPRQWTPGYDLPLGPQRKEPLGPALQFSFLGPKLHISTNEVSVGLRPVTGLRLYLGGKKFNRLSLHLQHLSTLPKSLQPYWKTSLSSEARLWKEPEDQSSRWFEPVQWKGFSHVTTAPVELEANATDTAFAYVVIGAQLQVWELDSKKVLFLRLLFFKIQGCSIRRSAWDHMPSLSQKSGLLSQLGLSTSMSSNQHAISTPFVQNSAVFPGGPPAPAPNAKLLKFVNTTEMTKGAKDLPGHWLVTGAKLDVENGKISLGVKYSLLHY

SEQ ID NO: 1013 - protein, 604 aa, Huperzia phlegmaria
MDKKAVSNSTVEAKALEAVGALGRGYDVTLDLKLSYCKGSPESCLIQLDKQNLHDIVVPGGFTLFNISKDITCDKGERTRFRSDVLTFHEMSERFNQGLSINARIPLGLFNSMFNFRGPWHIDAQATKSLSLDGWFVTLYKMQIAKTPLVLCDEVKQAVPSSWDAAALANFIVKYGTHIVLSVKMGGKDAIYIRQQAHSQLSPFEIQKNLKKIGDLKFHGSRESNYTLNKEVISASTSKNFAQHLPISNTYDSISFVSQKDIEIIKQRRGGDKFVEAHEDWITTISSAPEVISMTFVPITSLLSGVLGSGFLSHAINLYMRYKPPIEEIQHFLEFQIPRQWTPGYDLPLGPPRKEPLGPALQFSFLGPKLHISTNEVTVGHRPVTGLRLCLGGKKFNRLSLHLQHLATVPKNLQPYWNTSSSNEAPVWKEPDEKNDRWFEPVQWKGFAHVTTIPMEIEPHSKGTACAYIVTGAQLQVWELETKKVLFLRLLFSKIHGCSIRRSIWDHVASSFPQKPALFSQLGLSTSMSSNQQAMPTPFSLNSAVFPGGPPAPAPNAKLLKFVNTTEMTKGAQDLPGHWLVTGAKLDVENGKISLGVKYSLLHY

SEQ ID NO: 1014 - protein, 513 aa, Huperzia carriata (Solomon Islands)
MSERFNQGLSINARIPLGLFNSMFNFRGPWHIDAQATKSLSLDGWFVTLYRMQIAKTPLVLCDEVKQAVPSSWDAAALANFIVKYGTHIVLSVKMGGKDVIYIRQQASSHLSPLEVQKYLKKIGDQKFRESKEPKEILNKEVTSAPTTMNLAQHLQFAKTYHSISFTSKKDIEIIMQRRGGNDFVEAHEEWLPTVSSAPEVISMTFVPIASLLNGVSGSGYLSHAINLYIRYKPPIEEIQQFLEFQIPRQWTPGYDLPLGPQRKEPLGPALQFSFLGPKLHISTNEVSVGLRPVTGLRLYLGGKKFNRLSLHLQHLSTLPKSLQPYWKTSLSSEARLWKEPEDQNSRWFEPVQWKGFSHVTTAPVELEGNATDTAFAYVVIGAQLQVWELDSKKVLFLRLLFLKIHGCSVRRSAWDHMPSLSQKSGLLSQLGLSTSMSSNQHAISTPFVQNSAVFPGGPPAPAPNAKLLKFVNITEMTKGAEDVPGHWLVTGAKLDVENGKISLGVKYSLLHY

SEQ ID NO: 1015 - protein, 416 aa, Selaginella biformis
MAQEKTSAYFTASEAVQALGKGFDTTLDLRLAGCKGPSGRLVELDETNREDLFVQDRVVIPNVSKDIRCDKGEFTHFRSEVLTFHQMSERFNQELSITGKMPLGLFNTMYSFNGPWQADASTTKSLALDGRFITSYKLQIVKSPLVLREEVKKAVPSSWDPAALAKFIDTYGTHIIVSVKVGGKDVVYVRQHQSSPLSPTELQKFIKRIADQKFAETNGSVSDSGNIKDKMQTPDLLAGSNHAHRLQLETFASSGGFTAKEDVEIIFRRRGGSNLLKSHNEWLKTVADAPDVISMTFVPITSLLNGVLGSGFLSHAVNLYLRHKPPIEDLQYFLEFQIPRQWSPGFDLPLGPQRKEPVCPAMQFSLMGPKLYVSTTQVSTKCFFSCFLYQLLLVSGDNRKKTCYRTTAFLGRQEMQ

SEQ ID NO: 1016 - protein, 492 aa, Platycerium bifurcatum
MFNYNGPWHVDAQTTKSLALDGWFITLYKMQITTTSLVLRDEVKQAVPSTWDAAALANFIEKYGTHIVLSVKMGGKDVIYIRQQAQSQLSPFEIQKNLKKIGDLKFHGSRESNYTLNKEVISASTSKNFVQHLPVSNTYDSISFVSQKDIEIIKQRRGGDKFVEAHEDWVTTISSAPEVISMTFVPITSLLSGVLGSGFLSHAINLYMRYKPPIEEIQHFLEFQIPRQWTPGYDLPLGPPRKEPLGPALQFSFLGPKLHISTNQVAVGHRPVTGLRLCLGGKKFNRLSLHLQHLATVPKNLQPYWNTSSSNEAPVWKEPDEKNDRWFEPVQWKGFAHVATIPMEIEPHSKGTACAYIVTGAQLQVWELETKKVLFLRLLFSKIHGCSIRRSIWDHVASSFPQKPALFSQLGLSTSMSSNQQAMPTPFSLNSAVFPGGPPAPAPNAKLLKFVNTTEMTKGAKDLPGHWLVTGAKLDVENGKISLGVKYSLLHY

SEQ ID NO: 1017 - protein, 580 aa, Huperzia nummarifolia
MDKRTVVYPTTRDKGLEAVRALGRGYDVTLDLKLGYCKGSPKSCLIQLDNQNVHDIVVPGGFTLFNVSKDISCDKGERTRFRSDVLSFNEMSERPWHVDAQTTKSLALDGWFITLYKMQITTTSLVLRDEVKQAVPSTWDAAALANFIEKYGTHIVLSVKMGGKDVIYIRQQAQSQLSPFEIQKNLKKIGDLKFHGSRESNYTLNKEVISASTSKNFVQHLPVSNTYDSISFVSQKDIEIIKQRRGGDKFVEAHEDWVTTISSAPEVISMTFVPITSLLSGVLGSGFLSHAINLYMRYKPPIEEIQHFLEFQIPRQWTPGYDLPLGPPRKEPLGPALQFSFLGPKLHISTNQVAVGHRPVTGLRLCLGGKKFNRLSLHLQHLATVPKNLQPYWNTSSSNEAPVWKEPDEKDDRWFEPVQWKGFAHVATIPMEIEPHSKGTACAYIVTGAQLQVWELETKKVLFLRLLFSKIHGCSIRRSIWDHVASSFPQKPALFSQLGLSTSMSSNQQAMPTPFSLNSAVFPGGPPAPAPNAKLLKFVNTTEMTKGAKDLPGHWLVTGAKLDVENGKISLGVKYSLLHY

SEQ ID NO: 1018 - protein, 514 aa, Huperzia squarrosa
MSERFNQGTSINGRMPLGLFNSMFNFRGPWHIDAQATKSLSLDGWFVTLYKMQIAKTPLVLCDEVKQAVPSSWDAAALASFIVKYGTHIVLSVKMGGKDVIYIRQQASSNLSPLEVQKYLKKIGDQRFRESREPTDILNKEVTSAPTTMNLAQHLQFAKTYHSISLTSKKDIEIIMQRRGGNDFVEAHEGWLQTVSSAPEVISMTFVPIASLLNGVAGSGYLSHAINLYIRYKPPIEEIQQFLEFQIPRQWTPGYDLPLGPQRKEPLGPALQFSFLGPKLHISTNQVSVGLRPVTGLRLYLGGKKFNRLSLHLQHLATLPKTLQPYWKTSLSSEARLWKEPEEQNSRWFEPVQWKGFSHVTTAPVELEPCATDTAFAYVVIGAQLQVWELDSKKVLFLRLLFLKIHGCSVRRSAWDHMPSLSQKSGLLSQLGLSSTSMSSNKHAASTPFVQNSAVFPGGPPALAPNAKLLKFVNITEMTKGAEDVPGHWLVTGAKLDVENGKISLGVKYSLLHY

SEQ ID NO: 1019 - protein, 604 aa, Huperzia phlegmaria
MDKRAVLNSTVQSKAIEAVGALGRGYDVTLDLKLGYCKGSPESCLIELDKQHFHDIVVPGDFTLFNVSKDITCDKGERTRFRSDVLTFHEMSERFNQGLSINARIPLGLFNSMFNFRGPWHIDAQATKSLSLDGWFVTLYKMQIAKTPLVLCDEVKQAVPSSWDAAALANFIVKYGTHIVLSVKMGGKDAIYIRQQASSHLSPLEVQKYLKKIGDQKFREFKEPKEILNKEVTSAPTTMNLAQHLQFAKTYHSISFTSKKDIEIIMQRRGGNDFVEAHEEWLPTVSSAPEVISMTFVPIASLLNGVAGSGYLSHAINLYIRYKPPIEEIQQFLEFQIPRQWTPGYDLPLGPQRKEPLGPALQFSFLGPKLHISTNEVTVGHRPVTGLRLCLGGKKFNRLSLHLQHLATVPKNLQPYWNTSSSNEAPVWKEPDEKNDRWFEPVQWKGFAHVTTIPMEIEPHSKGTACAYIVTGAQLQVWELETKKVLFLRLLFSKIHGCSIRRSIWDHVASSFPQKPALFSQLGLSTSMSSNQQAMPTPFSLNSAVFPGGPPAPAPNAKLLKFVNTTEMTKGAQDLPGHWLVTGAKLDVENGKISLGVKYSLLHY

SEQ ID NO: 1020 - protein, 603 aa, Huperzia nummulariifolia
MDKKAVSNSTVEAKALEAVGALGRGYDVTLDLKLSYCKGSPESCLIQLDKQHLHDIVVPGGFTLFNISKDITCDKGERTRFRSDVLSFNEMSERFNQGISINGRMPLGLFNSMFNFRGPWHIDAQATKSLSLDGWFVTLYKMQIAKTPLVLCEEVKQAVPSSWDAAALANFIVKYGTHIVLSVKMGGKDAIYIRQQASSHLSPLEVQKYLKKIGDQKFRESKEPKEILNKEVTSVPTTMNLAQHLQFAKTYHSISFTSKKDIEIIMQRRGGNDFVEAHEEWLPTVSSAPEVISMTFVPIASLLNGVAGSGYLSHAINLYIRYKPPIEEIQHFLEFQIPRQWTPGYDLPLGPQRKEPLGPALQFSFLGPKLHISTNEVSVGLRPVTGLRLYLGGKKFNRLSLHLQHLATVPKNLQPYWNTSSSNEAPVWKEPDEKNDRWFEPVQWKGFAHVATIPMEIEPHSKGTACAYIVTGAQLQVWELDSKKVLFLRLLFFKIQGCSIRRSAWDHMPSLSQKSGLLSQLGLSTSMSSNQHAISTPFVQNSAVFPGGPPAPAPNAKLLKFVNITEMTKGAQDLPGHWLVTGAKLDVENGKISLGVKYSLLHY

SEQ ID NO: 1021 - protein, 604 aa, Huperzia nummulariifolia
MDKRTVVYPTTREKGLEAVRALGRGYDVTLDLKLGYCKGSPQSCLIQLDNQNVHDIVVPGGFTLFNVSNDISCDKGERTRFRSDVLSFNEMSERFNQGISINGRMPLGLFNSMFNYNGPWHVDAQTTKSLALDGWFITLYKMQITTTSLVLRDEVKQAVPSTWDAAALANFIEKYGTHIVLSVKMGGKDAIYIRQQAQSQLSPFEIQKNLKKIGDLKFHGSRESNYTLNKEVISASTSKNFVQHLPVSNTYDSISFVSQKDIEIIKQRRGGDKFVEAHEDWVTTISSAPEVISMTFVPITSLLSGVLGSGFLSHAINLYMRYKPPIEEIQHFLEFQIPRQWTPGYDLPLGPPRKEPLGPALQFSFLGPKLHISTNQVAVGHRPVTGLRLCLGGKKFNRLSLHLQHLATVPKNLQPYWNTSSSNEAPVWKEPDEKNDRWFEPVQWKGFAHVATIPMEIEPHSKGTACAYIVTGAQLQVWELETKKVLFLRLLFSKIHGCSIRRSIWDHVASSFPQKPALFSQLGLSTSMSSNQQAMPTPFSLNSAVFPGGPPAPAPNAKLLKFVNTTEMTKGAKDLPGHWLVTGAKLDVENGKISLGVKYSLLHY

SEQ ID NO: 1022 - protein, 603 aa, Huperzia carriata (Solomon Islands)
MDKRTVVYPTTREKGLEAVRALGRGYDVTLDLKLGYCKGSPKSCLIQLDNQNVHDIVVPGGFTLFNVSKDISCDKGERTRFRSDVLTFHEMSERFNQGLSINARIPLGLFNSMFNFRGPWHIDAQATKSLSLDGWFVTLYRMQIAKTPLVLCDEVKQAVPSSWDAAALANFIVKYGTHIVLSVKMGGKDVIYIRQQASSHLSPLEVQKYLKKIGDQKFRESKEPKEILNKEVTSAPTTMNLAQHLQFAKTYHSISFTSKKDIEIIMQRRGGNDFVEAHEEWLPTVSSAPEVISMTFVPIASLLNGVSGSGYLSHAINLYIRYKPPIEEIQQFLEFQIPRQWTPGYDLPLGPQRKEPLGPALQFSFLGPKLHVSTNQVSVGLRPVTGLRLYLGGKKFNRLSLHLQHLSTLPKSLQPYWKTSLSSEARLWKEPEDQNSRWFEPVQWKGFSHVTTAPVELEGNATDTAFAYVVIGAQLQVWELDSKKVLFLRLLFLKIHGCSVRRSAWDHMPSLSQKSGLLSQLGLSTSMSSNQHAISTPFVQNSAVFPGGPPAPAPNAKLLKFVNITEMTKGAEDVPGHWLVTGAKLDVENGKISLGVKYSLLHY

SEQ ID NO: 1023 - protein, 651 aa, Huperzia tetratoides
MDKTAVLNSTLQSKAIEALGALGRGYDVTLDLKLGYCKGSPESCLIELEQHFHDIVVPGDFTLFNVSKDITCDKGERTRFRSDVLSFHEMSERFNQGLSINARIPLGLFNSMFNFRGPWHIDAQATKSLSLDGWFVTLYKMQVSRTSMVLCDEVKQAVPSSWDAAALASFIEKYGTHIVLSVKMGGKDAIYIRQQASSHLSPLEVQKYLKKIGDQRFRESREPKDILNKEVRSAPTTMNLAQHLQFAKTYHSISFMSKKDIEIIMQRRGGNDFVEAHEEWLPTVSSAPEVISMTFVPIASLLNGVAGSGYLSHAINLYIRYKPPIEEIQQFLEFQIPRQWTPGYDLPLGPQRKEPLGPALQFSFLGPKLHISTNEVSVGLRPVTGLRLYLGGKRFNRLSLHLQHLATLPKSLQPYWKTSLSSEARLWKQPYWKTSLSSEARLWKEPEDQSSRWFEPVQWKGFSHVTTAPVELEANATDTSFAYVVIGAQLQVWELDSKKVLFLRLLFLKIHGCSIRRSAWDHMPSLSQKSGLLSQLGLSTSMSSNQHAISTPFVQNSAVFPGGPPAPAPNAKLLKFVNITEMTKGAQDLPGHWLVTGAAPAPNAKLLKFVNITEMTKGAQDLPGHWLVTGAKLDVDNGKISLGVKYSLLHY

SEQ ID NO: 1024 - protein, 607 aa, Huperzia carinata
MDKRTVVYPTTREKGLEAVRALGRGYDVTLDLKLGYCKGSPKSCLIQLDNQNVHDIVVPGGFTLFNVSKDISCDKGERTRFRSDVLNFHEMSERFNQGLSINARIPLGLFNSMFNYNGPWHVDAQTTKSLALDGWFITLYKMQITMTSLVLRDEVKQAVPSTWDAAALANFIEKYGTHIVLSVKMGGKDAIYIRQQASSQLSPLEVQKYLKKIGDQKFRESKEPKEILNKEVTSAPTTMNLAQHLQFAKTYHSISFTSKKDIEIIMQRRGGNDFVEAHEEWLPTVSSAPEVISMTFVPIASLLNGVAGSGYLSHAINLYIRYKPPIEEIQQFLEFQIPRQWTPGYDLPLGPQRKEPLGPALQFSFLGPKLHISTNEVSVGLRPVTGLRLYLGGKKFNRLSLHLQHLSTLPKSLQPYWKTSLSSEARLWKEPEDQNSRWFEPVQWKGFSHVTTAPVELEANATDTAFAYVVIGAQLQVWELDSKKVLFLRLLFFKIQGCSIRRSAWDHMPSLSQMSQKSGILSQLGLSSTSMSSNKHAMSTPFVQNSAVFPGGPPAPAPNAKLLKFVNITEMTKGAQDLPGHWLVTGAKLDVENGKISLGVKYSLLHY

SEQ ID NO: 1025 - protein, 547 aa, Huperzia nummulariifolia (Blume)
MDKRTVVYPTTREKGLDAVRALGRGYDVTLDLKLGYCKGSSKSCLIQLDNQNVHDIVVPGGFTLFNVSKDISCDKGERNGRMPLGLFNSMFNYSGPWHVDAQTTKSLALDGWFITLYKMQITTTSLVLRDEVKQAVPSTWDAAALANFIEKYGTHRQQAQSQLSPFEIQKNLKKIGDLKFHGSRESNYTLNKEVVSASTSKNFAQHLPISNTYDSISFVSQKDIEIIKQRRGGDKFVEAHEDWITTISSAPEVISMTFVPITSLLSGVLGSGFLSHAINLYMRYKPPIEEIQHFLEFQIPRQWTPGYDLPLGPPRKEPLGPALQFSFLGPKLHISTNQVTVGHRPVTGLRLCLGGKKFNRLSLHLQHLTTVPKNLQPYWNTSSSNEAPVWKEPDEKNDRWFEPVQWKGFAHVATIPMEIEPHSKGTACAYIVTGAQLQVWELETKKVLFLRLLFSKIHGCSIRRSIWDHVASSFPQKPALFSQLGLSTSMSSNQQAMPTPFSLNSAVFPGGPPAPASNAKLLKFVNTTEMTKGAQDLPGHWLVTGAK

SEQ ID NO: 1026 - protein, 312 aa, Selaginella kraussiana (Variegata)
MEQEKTSAHFTASEAVQALGKGFDVTLDLRLAGCKGPHGRLVELDDTGRGDLFVQDRVVIPNVSKDIRCDKGEFTHFRSEVLTFHQMSERFNQELSITGKMPLGLFNHMYSFNGPWQADASSTKSLALDGRFITSYKLQIAKSPLVLRDEVKRAVPASWDPAALAKFIDTYGTHVIVSIKVGGKDVLYVRQHQSSPLSTTELQKLIKRFADQRFADTNGSVSDPRNVKNKMQPDLLAGRLPIESDTITAKEDVEIIFRRRGGSNLLRNHNEWLKTVAEAPDVISMTFVPITSLLNGVLGSGFLSHAVNLYLR

SEQ ID NO: 1027 - protein, 365 aa, Huperzia carriata (Philippines)
MNLAQHLQFAKTYHSISFTSKKDIEIIMQRRGGNDFVEAHEEWLPTVSSAPEVISMTFVPIASLLNGVAGSGYLSHAINLYIRYKPPIEEIQQFLEFQIPRQWTPGYDLPLGPQRKEPLGPALQFSFLGPKLHISTNEVSVGLRPVTGLRLYLGGKKFNRLSLHLQHLSTLPKSLQPYWKTSLSSEARLWKEPEDQSSRWFEPVQWKGFSHVTTAPVELEANATDTAFAYVVIGAQLQVWELDSKKVLFLRLLFFKIQGCSIRRSAWDHMPSLSQKSGLLSQLGLSTSMSSNQHAISTPFVQNSAVFPGGPPAPAPNAKLLKFVNTTEMTKGAKDLPGHWLVTGAKLDVENGKISLGVKYSLLHY

SEQ ID NO: 1028 - protein, 496 aa, Huperzia carinata
MDKKAVSNSTGEAKALEAVGALGRGYDVTLDLKLSYCKGSPESCLIQLDKQHLHDIVVPGGFTLFNISKDITCDKGERTRFRSDVLNFHEMSERFNQGLSINARIPLGLFNSMFNFRGPWHIDAQATKSLSLDGWFVTLYRMQIAKTPLVLCDEVKQAVPSSWDAAALANFIVKYGTHIVLSVKMGGKDAIYIRQQASSQLSPLEVQKYLKKIGDQKFRESKEPKEILNKEVTSAPTTMNLAQHLQFAKTYHSISFTSKKDIEIIMQRRGGNDFVEAHEEWLPTVSSAPEVISMTFVPIASLLNGVAGSGYLSHAINLYIRYKPPIEEIQQFLEFQIPRQWTPGYDLPLGPQRKEPLGPALQFSFLGPKLHISTNEVSVGLRPVTGLRLYLGGKKFNRLSLHLQHLSTLPKSLQPYWKTSLSSEARLWKEPEDQNSRWFEPVQWKGFSHVTTAPVELEANATDTAFAYVVIGAQWSTAASLGAGFKEGAISETLVL

SEQ ID NO: 1029 - protein, 604 aa, Huperzia phlegmaria
MDKKAVSNSTVEAKALEAVGALGRGYDVTLDLKLSYCKGSPESCLIQLDKQNLHDIVVPGGFTLFNISKDITCDKGERTRFRSDVLTFHEMSERFNQGLSINARIPLGLFNSMFNFRGPWHIDAQATKSLSLDGWFVTLYKMQIAKTPLVLCDEVKQAVPSSWDAAALANFIVKYGTHIVLSVKMGGKDAIYIRQQAHSQLSPFEIQKNLKKIGDLKFHGSRESNYTLNKEVISASTSKNFARHLPISNTYDSISFVSQKDIEIIKQRRGGDKFVEAHEDWITTISSAPEVISMTFVPITSLLSGVLGSGFLSHAINLYMRYKPPIEEIQHFLEFQIPRQWTPGYDLPLGPPRKEPLGPALQFSFLGPKLHISTNEVTVGHRPVTGLRLCLGGKKFNRLSLHLQHLATVPKNLQPYWNTSSSNEAPVWKEPDEKNDRWFEPVQWKGFAHVTTIPMEIEPHSKGTACAYIVTGAQLQVWELETKKVLFLRLLFSKIHGCSIRRSIWDHVASSFPQKPALFSQLGLSTSMSSNQQAMPTPFSLNSAVFPGGPPAPAPNAKLLKFVNTTEMTKGAQDLPGHWLVTGAKLDVENGKISLGVKYSLLHY

SEQ ID NO: 1030 - protein, 394 aa, Platycerium bifurcatum
MSERFNQGLSINARIPLGLFNSMFNFRGPWHIDAQATKSLSLDGWFVTLYKMQIALVLCDEVKQAVPSSWDAAALANFIVKYGTHIVLSVKMGGKDAIYIRQQASSHLSPLEVQKYLKKIGDQKFRESKEPKEILNKEVTSVPTTMNLAQHLQFAKTYHSISFTSKKDIEIIMQRRGGNDFVEAHEEWLPTVSSAPEVISMTFVPIASLLNGVAGSGYLSHAINLYIRYKINLYIRYKPPIEEIQQFLEFQIPRQWTPGYDLPLGPQRKEPLGPALQFSFLGPKLHISTNEVSVGLRPVTGLRLYLGGKKFNRLSLHLQHLSTLPKSLQPYWKTSLSSEARLWKEPEDQNSRWFEPVQWKGFSHVTTAPVELEANATDTAFAYVVIGAQLQVWE

SEQ ID NO: 1031 - protein, 604 aa, Selaginella erythropus (Sanguinea)
MAQEKTAAFSTATEAVQALGKGFDVTLDLRLAGCKGPNGRLVEVNETNTEDLFVQDRVVIPNVSKDIRCDKGEFTHFRSEVLTFHQMSERFNQELSITGKMPLGLFNNMYSYNGPWQADASSTKSLALDGRFITSYKLQIVKSPLVLRDEVKKAVPASWDPAALAKFIDTYGTHVIASIKVGGKDVVYVRQHQSSPLSPTELQKFIKRFADQRFADTNGSVSDPRNIKDKTPDLLPGPNNQHRLQLETLGSGVVTAKEDVEIIFRRRGGSNLLRNHNEWLKTVAEAPDVISMTFVPITSLLNGVLGSGFLSHAVNLYLRHKPPIEDLQYFLEFQIPRQWSPGFDLPLGPQRKEPVCPAMQFSLMGPKLYVSTAQVTIGRRPVTGLRLFLEGKKCNRLGIHLQHLSSLPKILLPHWDSNVPIGPPVWKGPEEQDSKWFEPVQWKSFSHVSTQPVEFIEESYVGQTSGTYIVTGAQLGVWDFGMKKVLFLRLLFSRIPGCAIRRTVWDHSPTTSQKSGLFSQLGLSSTFSGAQKASKPTPVVLNSAVYPGGPPVPVPSRKLLKYVDITEMTKGAHDMPGHWIVTGAKLDVDRGRIALRLKYSLLHY

SEQ ID NO: 1032 - protein, 603 aa, Huperzia phlegmaria
MDKRAVLNSTVQSKAIEAVGALGRGYDVTLDLKLGYCKGSPESCLIELDKQHFHDIVVPGDFTLFNVSKDITCDKGERTRFRSDVLTFHEMSERFNQGLSINARIPLGLFNSMFNFRGPWHIDAQATKSLSLDGWFVTLYKMQIAKTPLVLCDEVKQAVPSSWDAAALANFIVKYGTHIVLSVKMGGKDAIYIRQQASSHLSPLEVQKYLKKIGDQKFREFKEPKEILNKEVTSAPTTMNLAQHLQFAKTYHSISFTSKKDIEIIMQRRGGNDFVEAHEEWLPTVSSAPEVISMTFVPIASLLNGVAGSGYLSHAINLYIRYKPPIEEIQQFLEFQIPRQWTPGYDLPLGPQRKEPLGPALQFSFLGPKLHISTNEVSVGLRPVTGLRLYLGGKKFNRLSLHLQHLSTLPKSLQPYWKTSLSSEARLWKEPEDQNSRWFEPVQWKGFSHVTTAPVELEANATDTAFAYVVIGAQLQVWELDSKKVLFLRLLFLKIHGCSIRRSAWDHMPTLSQKSGLLSQLGLSTSMSSNQHAISTPFVQNSAVFPGGPPAPAPNAKLLKFVNITEMTKGAQDLPGHWLVTGAKLDVENGKISLGVKYSLLHY

SEQ ID NO: 1033 - protein, 625 aa, Huperzia tetratoides
MDKRTVVYPTAREKGLEAVRALGRGYDVTLDLKLGYCKGSRQSCLIQLDNENVHDIVVPGGFTLCNVSKDISCDKGERTRFRSDVLSFHEMSERFNQGLSINARIPLGLFNSMFNFRGPWHIDAQATKSLSLDGWFVTLYKMQIAKTSLVLCDEVKQAVPSSWDAAALASFIVKYGTHIVLSVKMGGKDAIYIRQQASSHLSPLEVQKYLKKIGDQRFRESREPKDILNKEVRSAPTTMNLAQHLQFAKTYHSISFMSKKDIEIIMQRRGGNDFVEAHEEWLPTVSSAPEVISMTFVPIASLLNGVAGSGYLSHAINLYIRYKPPIEEIQQFLEFQIPRQWTPGYDLPLGPQRKEPLGPALQFSFLGPKLHISTNEVSVGLRPVTGLRLYLGGKRFNRLSLHLQHLATLPKSLQPYWKTSLSSEARLWKEPPKSLQPYWKTSLSSEARLWKEPEDQSSRWFEPVQWKGFSHVTTAPVELEANATDTSFAYVVIGAQLQVWELDSKKVLFLRLLFLKIHGCSIRRSAWDHMPSLSQKSGLLSQLGLSTSMSSNQHAISTPFVQNSAVFPGGPPAPAPNAKLLKFVNITEMTKGAQDLPGHWLVTGAKLDVENGKISLAVKYSLLHY

SEQ ID NO: 1034 - protein, 603 aa, Huperzia carinata
MDKRTVVYPTTREKGLEAVRALGRGYDVTLDLKLGYCKGSPKSCLIQLDNQNVHDIVVPGGFTLFNVSKDISCDKGERTRFRSDVLNFHEMSERFNQGLSINARIPLGLFNSMFNFRGPWHIDAQATKSLSLDGWFVTLYRMQIAKTPLVLCDEVKQAVPSSWDAAALANFIVKYGTHIVLSVKMGGKDVIYIRQQAQSQLSPFEIQKNLKNIGDLKFHGSRESSYTLNKEVISASTSKNFVQHLPVSNTYDSISFVSQKDIEIIKQRRGGDKFVEAHEDWVTTISSAPEVISMTFVPITSLLSGVLGSGFLSHAINLYMRYKPPIEEIQHFLEFQIPRQWTPGYDLPLGPPRKEPLGPALQFSFLGPKLRISTNQVTVGHKPVTGLRLCLGGKKLNRLSLHLQHLSTLPKSLQPYWKTSLSSEARLWKEPEDQNSRWFEPVQWKGFSHVTTAPVELEANATDTAFAYVVIGAQLQVWELDSKKVLFLRLLFFKIQGCSIRRSAWDHMPSLSQKSGLLSQLGLSTSMSSNQHAISTPFVQNSAVFPGGPPAPAPNAKLLKFVNITEMTKGAQDLPGHWLVTGAKLDVENGKISLGVKYSLLHY

SEQ ID NO: 1035 - protein, 543 aa, Selaginella pallescens
MSERFNQELSITGKMPLGLFNHMYSFNGPWQADASSTKSLALDGRFITSYKLQIAKSPLVLRDEVKRAVPASWDPAALAKFIDTYGTHVIVSIKVGGKDVLYVRQHQSSPLSTTELQKLIKRFADQRFADTNGSVSDPRNVKNKMQPDLLAGRLPIESDTITAKEDEIIFRRRGGSNLLRNHNEWLKTVAEAPDVISMTFVPITSLLNGVLGSGFLSHAVNLYLRHKPPIEDLQYFLEFQIPRQWSPGFDLPLGPQRKEPVCPAMQFSLMGPKLYVSTAQVTIGRRPVTGLRLFLEGKKCNRLGIHLQHLSSLPKILQPHWDSNVPIGPPVWKGPEEQDSKWFEPVQWKSFSHVNVPIGPPVWKGPEEQDSKWFEPVQWKSFSHVSTQPVEFLEESYVGQTSGTYIVTGGQLGVWDFGMKKVLFLRLLFSRVPGCAIRRTIWDHSPTTSQKSGLFSQLGLSSTFSGAQKAAAAKPAPVVLNSAVYPGGPPVPVPSRKLLKYVDITEMTKGAHDMPGHWIVTGAKLDVDRGRIALRLKYSLLHY

SEQ ID NO: 1036 - protein, 604 aa, Huperzia phlegmaria
MDKRTVVYLTTREKGLEAVRALGRGYDVTLDLKLGYCKGSPKSCLIQLDNQNVHDIVVPGGFTLSNVSKDISCDKGERTRFRSDVLSFNEMSERFNQGLSINARIPLGLFNSMFNFRGPWHIDAQATKSLSLDGWFVTLYKMQIAKTPLVLCDEVKQAVPSSWDAAALANFIVKYGTHIVLSVKMGGKDAIYIRQQAHSQLSPFEIQKNLKKIGDLKFHGSRESNYTLNKEVISASTSKNFARHLPISNTYDSISFVSQKDIEIIKQRRGGDKFVEAHEDWITTISSAPEVISMTFVPITSLLSGVLGSGFLSHAINLYMRYKPPIEEIQHFLEFQIPRQWTPGYDLPLGPPRKEPLGPALQFSFLGPKLHISTNEVTVGHRPVTGLRLCLGGKKFNRLSLHLQHLATVPKNLQPYWNTSSSNEAPVWKEPDEKNDRWFEPVQWKGFAHVTTIPMEIEPHSKGTACAYIVTGAQLQVWELETKKVLFLRLLFSKIHGCSIRRSIWDHVASSFPQKPALFSQLGLSTSMSSNQQAMPTPFSLNSAVFPGGPPAPAPNAKLLKFVNTTEMTKGAQDLPGHWLVTGAKLDVENGKISLAVKYSLLHY

SEQ ID NO: 1037 - protein, 493 aa, Huperzia carriata (Philippines)
MSERFNQGLSINARIPLGLFNSMFNFRGPWHIDAQATKSLSLDGWFVTLYRIEKYGTHIVLSVKMGGKDAIYIRQQASSQLSPLEVQKYLKKIGDQKFRESKEPKEILNKEVTSAPTTMNLAQHLQFAKTYHSILQFAKTYHSISFTSKKDIEIIMQRRGGNDFVEAHEEWLPTVSSAPEVISMTFVPIASLLNGVAGSGYLSHAINLYIRYKPPIEEIQQFLEFQIPRQWTPGYDLPLGPQRKEPLGPALQFSFLGPKLHISTNEVSVGLRPVTGLRLYLGGKKFNRLSLHLQHLSTLPKSLQPYWKTSLSSEARLWKEPEDQSSRWFEPVQWKGFSHVTTAPVELEANATDTAFAYVVIGAQLQVWELDSKKVLFLRLLFFKIQGCSIRRSAWDHMPSLSQKSGLLSQLGLSTSMSSNQHAISTPFVQNSAVFPGGPPAPAPNAKLLKFVNTTEMTKGAKDLPGHWLVTGAKLDVENGKISLGVKYSLLHY

SEQ ID NO: 1038 - protein, 598 aa, Selaginella pallescens
MEQEKTSAHFTASEAVQALGKGFDVTLDLRLAGCKGPHGRLVELDDTSRGDLFVQDRVVIPNVSKDIRCDKGEFTHFRSEVLTFHQMSERFNQELSITGKMPLGLFNHMYSFNGPWQADASSTKSLALDGRFITSYKLQIAKSPLVLRDEVKRAVPASWDPAALAKFIDTYGTHVIVSIKVGGKDVLYVRQHQSSPLSTTELQKLIKRFADQRFADTNGSVSDPRNVKNKMQPDLLAGRLPIESDTITAKEDEIIFRRRGGSNLLRNHNEWLKTVAEAPDVISMTFVPITSLLNGVLGSGFLSHAVNLYLRHKPPIEDLQYFLEFQIPRQWSPGFDLPLGPQRKEPVCPAMQFSLMGPKLYVSTAQVTIGRRPVTGLRLFLEGKKCNRLGIHLQHLSSLPKILQPHWDSNVPIGPPVWKGPEEQDSKWFEPVQWKSFSHVSTQPVEFLEESYVGQTSGTYIVTGGQLGVWDFGMKKVLFLRLLFSRVPGCAIRRTIWDHSPTTSQKSGLFSQLGLSSTFSGAQKAAAAKPAPVVLNSAVYPGGPPVPVPSRKLLKYVDITEMTKGAHDMPGHWIVTGAKLDVDRGRIALRLKYSLLHY

SEQ ID NO: 1039 - protein, 432 aa, Huperzia carinata
MSERFNQGLSINARIPLGLFNSMFNFRGPWHIDAQATKSLSLDGWFVTLYRMQIAKTPLVLCDEVKQAVPSSWDAAALANFIVKYGTHIVLSVKMGGKDAIYIRQQASSQLSPLEVQKYLKKIGDQKFRESKEPKEILNKEVTSAPTTMNLAQHLQFAKTYHSISFTSKKDIEIIMQRRGGNDFVEAHEEWLPTVSSAPEVISMTFVPIASLLNGVAGSGYLSHAINLYIRYKPPIEEIQQFLEFQIPRQWTPGYDLPLGPQRKEPLGPALQFSFLGPKLHISTNEVSVGLRPVTGLRLYLGGKKFNRLSLHLQHLSTLPKSLQPYWKTSLSSEARLWKEPEDQNSRWFEPVQWKGFSHVTTAPVELEANATDTAFAYVVIGAQLQVWELDSKKVLFLRLLFFKIQGCSIRRSAWDHMPSLSQRHSLTARTQ

SEQ ID NO: 1040 - protein, 604 aa, Huperzia tetratoides
MDKRTLVYPTAREKGLEAVRALGRGYDVTLDLKLGYCKGSRQSCLIQLDNENVHDIVVPGGFTLCNVSKDISCDKGERTRFRSDVLSFHEMSERFNQGLSINARIPLGLFNSMFNFRGPWHIDAQATKSLSLDGWFVTLYKMQIAKTSLVLCDEVKQAVPSSWDAAALASFIVKYGTHIVLSVKMGGKDVIYIRQQALSQLSPFEIQKNLKKIGDLSFHGSRESNHTLNKEVISASTSKHFAQHLPISHTYDSISFVSQKDIEIIEQRRGGDKFVKAHEDWVTTISSAPEVISMTFVPITSLLSGVLGSGFLSHAINLYMRYKPPVEEIQHFLEFQIPRQWTPGYDLPLGPPRKEPLGPALQFSFLGPKLYISTNQVTVGQRPVTGLRLCLGGKKFNRLSLHLQHLATVPKNLQPYWNTSSSSEAPVWKEPEEKSDRWFEPVQWKGFSHVATLPVEIEPHSKGTARAYIVTGAQLQVWELDTKKVLFLRLLFSKIHGCSIRRSIWDHVASSFSQKPALFSQLGLSTSMPSNQQAMPTPFSLNSAVFPGGPPAPAPNAKLLKFVNITEMTKGAQDLPGHWLVTGAKLDVENGKISLAVKYSLLHY

SEQ ID NO: 1041 - protein, 420 aa, Platycerium bifurcatum
MGGKDVIYIRQQAQSQLSPFEIQKNLKKIGDLKFHGSRESNYTLNKEVISASTSKNFVQHLPVSNTYDSISFVSQKDIEIIKQRRGGDKFVEAHEDWVTTISSAPEVISMTFVPITSLLSGVLGSGFLSHAINLYMRYKPPIEEIQHFLEFQIPRQWTPGYDLPLGPPRKEPLGPALQFSFLGPKLHISTNQVAVGHRPVTGLRLCLGGKKFNRLSLHLQHLATVPKNLQPYWNTSSSNEAPVWKEPDEKNDRWFEPVQWKGFAHVATIPMEIEPHSKGTACAYIVTGAQLQVWELETKKVLFLRLLFSKIHGCSIRRSIWDHVASSFPQKPALFSQLGLSTSMSSNQQAMPTPFSLNSAVFPGGPPAPAPNAKLLKFVNTTEMTKGAKDLPGHWLVTGAKLDVENGKISLGVKYSLLHY

SEQ ID NO: 1042 - protein, 603 aa, Huperzia carinata
MDKRAVLNSTVQSKAIEAVGALGRGYDVTLDLKLGYCKGSPESCLIELDKQHFHDIVVPGDFTLFNVSKDITCDKGERTRFRSDVLNFHEMSERFNQGLSINARIPLGLFNSMFNFRGPWHIDAQATKSLSLDGWFVTLYRMQIAKTPLVLCDEVKQAVPSSWDAAALANFIVKYGTHIVLSVKMGGKDAIYIRQQASSQLSPLEVQKYLKKIGDQRFRESREPKDIINKEATSTPTSMNLAQHLQIAKTYHSISFTSKKDIEIIMQRRGGNDFVEAHEEWLPTVSSAPEVISMTFVPIASLLNGVAGSGYLSHAINLYIRYKPPIEEIQQFLEFQIPRQWTPGYDLPLGPQRKEPLGPALQFSFLGPKLHISTNEVSVGLRPVTGLRLYLGGKKFNRLSLHLQHLSTLPKSLQPYWKTSLSSEARLWKEPEDQNSRWFEPVQWKGFSHVTTAPVELEANATDTAFAYVVIGAQLQVWELDSKKVLFLRLLFFKIQGCSIRRSAWDHMPSLSQKSGLLSQLGLSTSMSSNQHAISTPFVQNSAVFPGGPPAPAPNAKLLKFVNITEMTKGAQDLPGHWLVTGAKLDVENGKISLGVKYSLLHY

SEQ ID NO: 1043 - protein, 532 aa, Selaginella pallescens
MSERFNQELSITGKMPLGLFNHMYSFNGPWQADASSTKSLALDGRFITSYKLQIAKSPLVLRDEVKRAVPASWDPAALAKFIDTYGTHVIVSIKVGGKDVLYVRQHQSSPLSTTELQKLIKRFADQRFADTNGSVSDPRNVKNKMQPDLLAGRLPIESDTITAKEDEIIFRRRGGSNLLRNHNEWLKTVAEAPDVISMTFVPITSLLNGVLGSGFLSHAVNLYLRHKPPIEDLQYFLEFQIPRQWSPGFDLPLGPQRKEPVCPAMQFSLMGPKLYVSTAQVTFSCRFLPFFFLKQHFPAQVTIGRRPVTGLRLFLEGKKCNRLGIHLQHLSSLPKILQPHWDSNVPIGPPVWKGPEEQDSKWFEPVQWKSFSHVSTQPVEFLEESYVGQTSGTYIVTGGQLGVWDFGMKKVLFLRLLFSRVPGCAIRRTIWDHSPTTSQKSGLFSQLGLSSTFSGAQKAAAAKPAPVVLNSAVYPGGPPVPVPSRKLLKYVDITEMTKGAHDMPGHWIVTGAKLDVDRGRIALRLKYSLLHY

SEQ ID NO: 1044 - protein, 367 aa, Huperzia carriata (Philippines)
MDKKAVSNSTVEAKALEAVGALGRGYDVTLDLKLSYCKGSPESCLLQLDKQHLHDIVVPGGFTLFNISKDITCDKGERTRFRSDVLSFNEMSERFNQGLSINARIPLGLFNSMFNFRGPWHIDAQATKSLSLDGWFVTLYRMQITKTPLVLCDEVKQAVPSSWDAAALANFIVKYGTHIVLSVKMGGKDAIYIRQQASSQLSPLEVQKYLKKIGDQRFRESREPKDIINKEATSTPTSMNLAQHLQIAKTYNSISFVSKKDIEIIKQRRGGSDFVKSHEEWLTTVSSAPEVISMTFVPIASLLNGVAGSGYLSHAINLYIRYKPPIEEIQQFLEFQIPRQWTPGYDLPLRSALGTSKKRASGSCFAV

SEQ ID NO: 1045 - protein, 463 aa, Huperzia squarrosa
MQITTTSLVLRDEVKQEVPSAWDAAALANFIEKYGTHIVLSVKMGGKDVIYIRQQASSNLSPLEVQKYLKKIGDQRFRESREPTDILNKEVTSAPTTMNLAQHLQFAKTYHSISLTSKKDIEIIMQRRGGNDFVEAHEGWLQTVSSAPEVISMTFVPIASLLNGVAGSGYLSHAINLYIRYKPPIEEIQQFLEFQIPRQWTPGYDLPLGPQRKEPLGPALQFSFLGPKLHISTNQVSVGLRPVTGLRLYLGGKKFNRLSLHLQHLATLPKTLQPYWKTSLSSEARLWKEPEEQNSRWFEPVQWKGFSHVTTAPVELEPCATDTAFAYVVIGAQLQVWELDSKKVLFLRLLFLKIHGCSVRRSAWDHMPSLSQKSGLLSQLGLSSTSMSSNKHAASTPFVQNSAVFPGGPPALAPNAKLLKFVNITEMTKGAEDVPGHWLVTGAKLDVENGKISLGVKYSLLHY

SEQ ID NO: 1046 - protein, 603 aa, Huperzia nummulariifolia
MDKKAVSNSTVEAKALEAVGALGRGYDVTLDLKLSYCKGSPESCLIQLDKQHLHDIVVPGGFTLFNISKDITCDKGERTRFRSDVLSFNEMSERFNQGISINGRMPLGLFNSMFNFRGPWHIDAQATKSLSLDGWFVTLYKMQIAKTPLVLCEEVKQAVPSSWDAAALANFIVKYGTHIVLSVKMGGKDAIYIRQQAQSQLSPFEIQKNLKKIGDLKFHGSRESNYTLNKEVISASTSKNFVQHLPVSNTYDSISFVSQKDIEIIKQRRGGDKFVEAHEDWVTTISSAPEVISMTFVPITSLLSGVLGSGFLSHAINLYMRYKPPIEEIQHFLEFQIPRQWTPGYDLPLGPQRKEPLGPALQFSFLGPKLHISTNEVSVGLRPVTGLRLYLGGKKFNRLSLHLQHLATVPKNLQPYWNTSSSNEAPVWKEPDEKNDRWFEPVQWKGFAHVATIPMEIEPHSKGTACAYIVTGAQLQVWELDSKKVLFLRLLFFKIQGCSIRRSAWDHMPSLSQKSGLLSQLGLSTSMSSNQHAISTPFVQNSAVFPGGPPAPAPNAKLLKFVNITEMTKGAQDLPGHWLVTGAKLDVENGKISLGVKYSLLHY

SEQ ID NO: 1047 - protein, 604 aa, Huperzia carinata
MDKRTVVYPTTREKGLEAVRALGRGYDVTLDLKLGYCKGSPKSCLIQLDNQNVHDIVVPGGFTLFNVSKDISCDKGERTRFRSDVLNFHEMSERFNQGLSINARIPLGLFNSMFNYNGPWHVDAQTTKSLALDGWFITLYKMQITMTSLVLRDEVKQAVPSTWDAAALANFIEKYGTHIVLSVKMGGKDVIYIRQQAQSQLSPFEIQKNLKNIGDLKFHGSRESSYTLNKEVISASTSKNFVQHLPVSNTYDSISFVSQKDIEIIKQRRGGDKFVEAHEDWVTTISSAPEVISMTFVPITSLLSGVLGSGFLSHAINLYMRYKPPIEEIQHFLEFQIPRQWTPGYDLPLGPPRKEPLGPALQFSFLGPKLRISTNQVTVGHKPVTGLRLCLGGKKLNRLSLHLQHLATVPKNLQAYWNTSSSNEAPVWKEPDEKNDRWFEPVQWKGFSHVTTIPMEIEPHSKGAACAFIVTGAQLQVWELETKKVLFLRVLFSKIHGCSIRRSIWDHVASSFPQKPALFSQLGLSTSMSSNQQAMPTPFSLNSAVFPDGPPAPAPNAKLLKFVNTTEMTKGAKDLPGHWLVTGAKLDVENGKISLGVKYSLLHY

SEQ ID NO: 1048 - protein, 393 aa, Selaginella erythropus (Sanguinea)
MAQEKTAAFSTATEAVQALGKGFDVTLDLRLAGCKGPNGRLVEVNETNTEDLFVQDRVVIPNVSKDIRCDKGEFTHFRSEVLTFHQMSERFNQELSITGKMPLGLFNNMYSYNGPWQADASSTKSLALDGRFITSYKLQIVKSPLVLRDEVKKAVPASWDPAALAKFIDTYGTHVIASIKVGGKDVVYVRQHQSSPLSPTELQKFIKRFADQRFADTNGSVSDPRNIKDKTPDLLPGPNNQHRLQLETLGSGVVTAKEDVEIIFRRRGGSNLLRNHNEWLKTVAEAPDVISMTFVPITSLLNGVLGSGFLSHAVNLYLRHKPPIEDLQYFLEFQIPRQWSPGFDLPLGPQRKEPVCPAMQFSLMGPKLYVSTAQVSPTLPRLCFASTFLPRFR

SEQ ID NO: 1049 - protein, 513 aa, Huperzia carriata (Philippines)
MSERFNQGLSINARIPLGLFNSMFNFRGPWHIDAQATKSLSLDGWFVTLYRMQITKTPLVLCDEVKQAVPSSWDAAALANFIVKYGTHIVLSVKMGGKDAIYIRQQASSQLSPLEVQKYLKKIGDQKFRESKEPKEILNKEVTSAPTTMNLAQHLQFAKTYHSISFTSKKDIEIIMQRRGGNDFVEAHEEWLPTVSSAPEVISMTFVPIASLLNGVAGSGYLSHAINLYIRYKPPIEEIQQFLEFQIPRQWTPGYDLPLGPQRKEPLGPALQFSFLGPKLHISTNEVSVGLRPVTGLRLYLGGKKFNRLSLHLQHLATVPKNLQAYWNTSSSNEAPVWKEPDEKNDRWFEPVQWKGFSHVTTIPMEIEPHSKGAACAFIVTGAQLQVWELDSKKVLFLRLLFFKIQGCSIRRSAWDHMPSLSQKSGLLSQLGLSTSMSSNQHAISTPFVQNSAVFPGGPPAPAPNAKLLKFVNTTEMTKGAKDLPGHWLVTGAKLDVEDGKISLGVKYSLLHY

SEQ ID NO: 1050 - protein, 603 aa, Huperzia squarrosa
MDKRAVLNSTVQSKAIEAVGALGRGYDVTLDLKLGYCKGSPESCLIELDKQHFHDIVVPGDFTLLNVSKDITCDKGERTRFRSDVLSFHEMSERFNQGTSINGRMPLGLFNSMFNFRGPWHIDAQATKSLSLDGWFVTLYKMQVSRTSLVLCDEVKQAVPSSWDAAALASFIEKYGTHIVLSVKMGGKDVIYIRQQASSNLSPLEVQKYLKKIGDQRFRESREPTDILNKEVTSAPTTMNLAQHLQFAKTYHSISLTSKKDIEIIMQRRGGNDFVEAHEGWLQTVSSAPEVISMTFVPIASLLNGVAGSGYLSHAINLYIRYKPPIEEIQQFLEFQIPRQWTPGYDLPLGPQRKEPLGPALQFSFLGPKLHISTNQVSVGLRPVTGLRLYLGGKKFNRLSLHLQHLATLPKSLQPYWKTSLSSEARMWKEPEDQSSRWFEPVQWKGFSHVTTAPVELEANATDTAFAYVVIGAQLQVWELDSKKVLFLRLLFLKIHGCSVRRSAWDHMPSLSQKSGLLSQLGLSTSMSSNQHAVSTPFVQNSAVFPGGPPAPAPNAKLLKFVNITEMTKGAEDVPGHWLVTGAKLDVENGKISLGVKYSLLHY

SEQ ID NO: 1051 - protein, 603 aa, Huperzia carriata (Solomon Islands)
MDKKAVSNSTVEAKALEAVGALGRGYDVTLDLKLSYCKGSPESCLIQLDKQHLHDIVVPGGFTLFNISKDITCDKGERTRFRSDVLTFHEMSERFNQGLSINARIPLGLFNSMFNFRGPWHIDAQATKSLSLDGWFVTLYRMQIAKTPLVLCDEVKQAVPSSWDAAALANFIVKYGTHIVLSVKMGGKDVIYIRQQASSHLSPLEVQKYLKKIGDQKFRESKEPKEILNKEVTSAPTTMNLAQHLQFAKTYHSISFTSKKDIEIIMQRRGGNDFVEAHEEWLPTVSSAPEVISMTFVPIASLLNGVSGSGYLSHAINLYIRYKPPIEEIQQFLEFQIPRQWTPGYDLPLGPQRKEPLGPALQFSFLGPKLHISTNEVSVGLRPVTGLRLYLGGKKFNRLSLHLQHLSTLPKSLQPYWKTSLSSEARLWKEPEDQNSRWFEPVQWKGFSHVTTAPVELEGNATDTAFAYVVIGAQLQVWELDSKKVLFLRLLFLKIHGCSVRRSAWDHMPSLSQKSGLLSQLGLSTSMSSNQHAISTPFVQNSAVFPGGPPAPAPNAKLLKFVNITEMTKGAEDVPGHWLVTGAKLDVENGKISLGVKYSLLHY

SEQ ID NO: 1052 - protein, 518 aa, Huperzia salvinioides
MAERFNEALNISGKVPLGLFNTMFSFNGTWQSDASAIKALAVDCWVISLYNMQISKTLKNLKEEVKKAVPPFWEPAALARFIEKYGTHIIMSVKIGGRDVVYIKQYQSSTLSPEEIKRYLREIADQRFAEGSGQGISNMQSKEKSSDPLTSANHAHRLQMANTHTSTSFTAKGDVEVIFRRRGGDCTVKHHSDWLDTVPSSPDVVEMSFIPITALLNGVPGSGFLSHAIKLYLRYKPPIEELQFFLEFQIPRQWSPGFDLPLVPQRKEPVCPSLQFSLMGPKVYVSTNQVTVGRRPVTGLRLSLEGKKGNRLAIHLQHLSNLPKILQPHWDQHIPIGLPVWKEPEEQDSKWFEPVQWKSFSHVSTAPIEYLKESYVGETSAVYIVTGAQLRVWDFGLKNVLFLRLLFLKVPGCSVKRTVWDHSPESSQKSGLLSQLGLSTTFSSASKAKPAPVVLNSAVFPEGPPVPVQNLKFLKFVDVKEMSKGAQDVPGHWLVTGAKLDVDKGKIALRVKYSLLHY

SEQ ID NO: 1053 - protein, 617 aa, Huperzia salvinioides
MVWAGDQEMAQTDSDRMAAQATAREALQALGRGFDVTLDLRLAYCKGPSGSRIIEFDEEANLDLVIPGGAAIIPNVSRDIRCEKGERKHFRSDVLPFHQMAERFNEALNISGKVPLGLFNTMFSFNGTWQSDASAIKALAVDCWVISLYNMQISKTLKNLKEEVKKAVPPFWEPAALARFIEKYGTHIIMSVKIGGRDVVYIKQYQSSTLSPEEIKRYLREIADQRFAEGSGQGISNMQSKEKSSDPLTSANHAHRLQMANTHTSTSFTAKGDVEVILRRRGGDCMVKHHSDWLATVPFSPDVIAMSFIPITALLNGVPGSGFLSHAIKLYLRYKPPIEELQFFLEFQIPRQWSPGFDLPLVPQRKEPVCPSLQFSLMGPKVYVSTNQVTVGRRPVTGLRLSLEGKKGNRLAIHLQHLSNLPKILQPHWDQHIPIGLPVWKEPEEQDSKWFEPVQWKSFSHVSTAPIEYLKESYVGETSAVYIVTGAQLRVWDFGLKNVLFLRLLFLKVPGCSVKRTVWDHSPESSQKSGLLSQLGLSTTFSSASKAKPAPVVLNSAVFPEGPPVPVQNLKFLKFVDVKEMSKGAQDVPGHWLVTGAKLDVDKGKIALRVKYSLLHY

SEQ ID NO: 1054 - protein, 617 aa, Huperzia salvinioides
MVWAGDQEMAQTDSDRMAAQATAREALQALGRGFDVTLDLRLAYCKGPSGSRIIEFDEEANLDLVIPGGAAIIPNVSRDIRCEKGERKHFRSDVLPFHQMAERFNEALNISGKVPLGLFNTMFSFNGTWQSDASAIKALAVDCWVISLYNMQISKTLKNLKEEVKKAVPPFWEPAALARFIEKYGTHIIMSVKIGGRDVVYIKQYQSSTLSPEEIKRYLREIADQRFAEGSGQGISNMQSKEKSSDPLTSANHAHRLQMANTHTSTSFTAKGDVEVIFRRRGGDCTVKHHSDWLDTVPSSPDVVEMSFIPITALLNGVPGSGFLSHAIKLYLRYKPPIEELQFFLEFQIPRQWSPGFDLPLVPQRKEPVCPSLQFSLMGPKVYVSTNQVTVGRRPVTGLRLSLEGKKGNRLAIHLQHLSNLPKILQPHWDQHIPIGLPVWKEPEEQDSKWFEPVQWKSFSHVSTAPIEYLKESYVGETSAVYIVTGAQLRVWDFGLKNVLFLRLLFLKVPGCSVKRTVWDHSPESSQKSGLLSQLGLSTTFSSASKAKPAPVVLNSAVFPEGPPVPVQNLKFLKFVDVKEMSKGAQDVPGHWLVTGAKLDVDKGKIALRVKYSLLHY

SEQ ID NO: 1055 - protein, 616 aa, Huperzia nummulariifolia
MGIDWAGDQMAYREAERTIAQSTAIEALQCLGRGFDVTLDLRLAYCKGPSGSLLVELSEETYPEIVLPGGVVITNVSKDIKCDKGERTHFRSEVLTFHQMSTRFNEALSITGKMPLGLFNTMFSFNGTWQGDASETKALALDGWFITLYNMQITKPELSLNEEVKKAVPSSWEPAALARFIEKYGTHIIVSVKLGGKDVVYLKQYESSLLSSGEVQKYLKVIADQRFSEEAGQNISDTHLKDKLPDPLTSTNHAHRLQMASNFTSSSFTTIKDVELIVRRRGGDSLVKRHNDWLATVSSAPDVVSMSFVAISSLLNGVPGSGFLSHAVNLYLRYKPPIEELQFFLEFQIPKQWSPGFDLPLGPQRKGPVCPAMQFSLMGPKLYVCTTQVTVGRRPVTGLRLFLEGKKGNRLTIHLQHLSNLPKILQPHWDQHIAIGPPIWKEPEEQDSKWFEPVQWKSFSHVSTAPLEYLVESYVGEINSTYIVTGAQLRVWDFGIKNVLFLRLLFCRVPGCSIKRSFWDHTPQASQKSNLFSQLGLSSISSARKAKPVPIVLNSAVFPDDPPQSTQTHKLLKFVDIKEMTKGAQDKPGHWLVTGAKLDVDGGKIALGVKYSLLHY

SEQ ID NO: 1056 - protein, 613 aa, Huperzia nummulariifolia (Blume)
MVWAGHQQMAQKEPGKLAAEVTAREAVQAIGRGFDVTLDLRLAYCKGPAGSRLIELDEEKNVDMVIPGGGFVLQGVSRDIRCDKGERTRFRSEVLSFHHMSERFNQALCISGKMPLGLFNAMYNLNGTWQSDASATKSLALDGWFISLYNLQLRKASLTLKEEVKEAVPSVWEPAALARFIDRYGTHIIESVKVGGKDVVYTRQYQSSPLTPGDIQKYLKELADQRFAEGSGQNNVNMRAKEKSLDPFTVTNHAHRLQLASTNTSSSFTAKGDVEVNYKRRGGDNLVRFHGDWLATVPLSPDVVSMSFVPITSLLNGVPGSGFLSHAINLYLRYKPPIEELRSFLEFQIPRQWCPGFDLPLGPQRKEPVCPSLQFSFMGPKLYINTAQVIVGRRPVTGLQLFLEGKKGNRLAIHLQHLSNLPKILQPHWGQHISVGDPVWKQPEEQETKWFEPVQWKSFSHVSTAPIEYGKEDDLIANIVTGAQLQVWDLGAKKVLFLRLLFSKVPGCSIKTSFWDHTPQSSQKSGLFSQLGLSTNFTSARKAKPAAVILNSAIFPEGPPAAVQKLKLLKFVDVKEMTKGAQDTPGHWLVTGARLDADRGKIAIRVKYALLLY

SEQ ID NO: 1057 - protein, 303 aa, Huperzia phlegmaria
MVWAGDQEMAQIEPDRMAAQATAREALQALGRGFDVTLDLRLAYCKGPSGSRIIEFDEEANLDLVIPGGVAIIPNVSGDIRCEKGERTHFISDVLSFHQMAERFNEALNISGKVPSGFFNTVFSLNGTWQSDASAIKALAVDCWVISLYNMQISRTPKNLKEEVKKAVPPFWEPAALARFIEKYGTHIIMSVKIGGKDVVYLRQYQSSTLSPGEIKKYLKEIADQRFAEGSGHDISNMQSKEKSSDPLTSANHAHRLQMANTHTSTSFTAKGDVEVIFRRRGGDCTVKHHSDWLDLFLLPLMS

SEQ ID NO: 1058 - protein, 613 aa, Huperzia tetratoides
MVSAGHRQMAQKEPGKLAAEVTAREAVQAIGRGFDVTLDLRLAYCKGPAGSRLIELDEEKNVDMVIPGGGFVLRGVSRDIRCDKGERTRFRSEVLSFHHMSERFNQALSISGKMPLGLFNTMYSLNGTWQSDASATKSLALDGWFISLYNLQLRKASLTLKEEVKEAVPSVWEPAALARFIDKYGTHIIESVKVGGKDVVYTRQYQSSPLTSGDIQKYLKELADQRFAEGSGTNNVNMRAKEKSPDPFTVTNHAHRLQLASTNTSSSFTAKGDVEVNFKRRGGDNLVRFHGDWLATVPLSPDVISMSFVPITSLLNGVPGSGFLSHAVNLYLRYKPPIEELRSFLEFQIPRQWSPGFDLPLGPQRKEPACPSLQFSFMGPKLYINTAQVIVGRRPVTGLQLFLEGKKGNRLAIHLQHLSNLPKILQPHWGQHISVGPPVWKQPEEQDTKWFEPVQWKSFSHVSTAPIEYGKEDDLIANIVTGAQLQVWELGAKKVLFLRLLFSKVPGCSIKTSFWDHTPQSSQKSGLFSQLGLSTNFTSARKAKPAAVILNSAIFPEGPPAAVQKLKLLKFVDVKEMTKGAHDTPGHWLVTGARLDADRGKIALRVKYALLLY

SEQ ID NO: 1059 - protein, 403 aa, Huperzia salvinioides
MVWAGHQQMAQKEPGKLAAEVTAREAVQAIGRGFDVTLDLRLAYCKGPAGSRLIELDEEKNVDMVIPGGGFVLQGVSRDIRCDKGERTRFRSEVLSFHHMSERFNQALCISGKMPLGLFNAMYNLNGTWQSDASATKSLALDGWFISLYNLQLRKASLTLKEEVKEAVPSVWEPAALARFIDRYGTHIIESVKVGGKDVVYTRQYQSSPLTPGDIQKYLKELADQRFAEGSGQNNVNMRAKEKSLDPFTVTNHAHRLQLASTNTSSSFTAKGDVEVNYKRRGGDNLVRFHGDWLATVPLSPDVVSMSFVPITSLLNGVPGSGFLSHAINLYLRYKPPIEELRSFLEFQIPRQWCPGFDLPLGPQRKEPVCPSLQFSFMGPKLYINTAQVQFHFKFVKSRLSKI

SEQ ID NO: 1060 - protein, 617 aa, Platycerium bifurcatum
MVWAGHQQMAQKEPGKFVAEVTAREAVQAIGRGFDVTLDLRLAYCKGPAGSRLIELDEEKNVDMVIPGGGFVLQGVSRDIRCDKGERTRFRSEVLSFHHMSERFNQALSIPGKMPLGLFNTMFSFNGTWQGDASETKALALDGWFITLYNMQITKPELSLNEEVKKAVPSSWEPAALARFIEKYGTHIIVSVKLGGKDVVYLKQYESSLLSSGEVQKYLKVIADQRFSEEAGQNISDTHLKDKLPDPLTSTNHAHRLQMASNFTSSSFTTIKDVELIVRRRGGDSLVKRHNDWLATVSSAPDVVSMSFVAISSLLNGVPGSGFLSHAVNLYLRYKPPIEELQFFLEFQIPKLWSPGFDLPLGPQRKGPVCPAMQFSLMGPKLYVCTTQVTVGRRPVTGLRLFLEGKKGNRLTIHLQHLSNLPKILQPHWDQHIAIGPPIWKEPEEQDSKWFEPVQWKSFSHVSTAPIEYLKESYVGETSAVYIVTGAQLRVWDFGLKNVLFLRLLFLKVPGCSVKRTIWDHSPESSQKSGLFSQLAVSKTFSSAHKAKPAPVVLNSAVLPEGPHVPVQSLKFLKFVDVKEMMKGAQDMPGHWLVTGAKLDVDKGKIALRVKYSLLHY

SEQ ID NO: 1061 - protein, 617 aa, Huperzia tetratoides
MVWAGDQEMVQKEPDRMVAQATAREALQALGRGFDVTLDLRLAYCKGPPGSCLIELDEEEKSEILIPGGAAIIPDVSRDIKCDKGERTHFSSEVLPFEQMSERFNQALSISGKVPLGLFNTMFSLNGTWQSDASATKALAVDGWFISLYNMQISKTPQSLKEEVIKAVPPFWEPAALASFIEKYGTHIIMSVKIGGKDVVYIRQYQSSPLSPGEIKRYLKEIADQRFAEGSEQFMSNTRSNEKSPIPLTSTSHAHRLQMANAYTSASFTTKGDVEVILRRRGGDCMVKHHSDWLATVPFSPDVIAMSFIPITSLLNGVPGSGFLSHAISLYLQYKPPIEELQLFLEFQIPRQWSPGFDLPFGCQRKEPVYPSLQFSLMGPKLYVSTAQVTVGRRPVTGLRLCLEGKKGNRLAIHLQHLSNLPKILQPHWDQHIPIGLPVWKEPEEQDSKWFEHVQWKSFSHVSTAPIEYRRESYVGETSAVYIVTGAQLRVWDFGLKNVLFLRLLFLKVPGCSVKRSIWDHAPQASQKSGLFSQFGLSTNFTSAHKAKPAPVVLNSAVFPEGPPAPAQNLKLLKFVDVKEMSKGAQDVPGHWLVTGAKLDVDKGKIALRLKYSLLHY

SEQ ID NO: 1062 - protein, 617 aa, Huperzia nummulariifolia
MVWAGDQEMVQNEPDRMAAQAIAREALQALGRGFDVTLDLRLAYCKGPPGSCLIELDEEEKSDILIPGGAAIIPDVSRDIKCDKGERTHFSSEVLPFEQMSERFNQALCISGKMPLGLFNSMYNLNGTWQSDASATKALAVEGWFISLYNMQISKIPLRLKEEVKKAVPPCWEPAALASFIEKYGTHIITSVKIGGKDVVYIRQYQSSPLSPGEIKSYLKEIADQRFAEGSEQFMLNMRSNEKSPIPLTSTSHAHRLQMANAYTSASFTTKGDVEVILRRRGGDCMVKHHSDWLATVPFSPDVIAMSFIPITALLNGVPGSGFLSHAINLYLRYKPPIEELQFFLEFQIPRQWSPGFDLPLVPQRKEPVCPSLQFSLMGPKIYVSTNQVTVGRRPVTGLRLFLEGKKGNRLAIHLQHLSNLPKILQPHWDQHIPIGLPVWKEPEEQDSKWFEPVQWKSFSHVSTAPIEYLKESYVGETSAVYIVTGAQLRVWDFGLKNVLFLRLLFLKVPGCSVKRTIWDHSPESSQKSGLFSQLAVSKTFSSAHKAKPAPVVLNSAVLPEGPHVPVQSLKFLKFVDVKEMMKGAQDMPGHWLVTGAKLDVDKGKIALRVKYSLLHY

SEQ ID NO: 1063 - protein, 371 aa, Huperzia nummarifolia
MVWAGDQEMAQTEPDRMAAQAIAREALQALGRGFDVTLDLRLAYCKGPPGSCLIELDEEEKSDILIPGGAAIIPDVSRDIKCDKGERTHFSSEVLPFEQMSERFNQALCISGKMPLGLFNSMYNLNGTWQSDASATKALAVEGWFISLYNMQISKIPLRLKEEVKKAVPPCWEPAALASFIEKYGTHIITSVKIGGKDVVYIRQYQSSPLSPGEIKRYLKEIADQRFAEGSEQFMLNMRSNEKSPIPLTSTSHAHRLQMANAYTSASFTTKGDVEVILRRRGGDCMVKHHSDWLATVPFSPDVIAMSFIPITALLNGVPGSGFLSHAINLYLRYKPPSFWNFRFPDSGLQVLTCQLSPREKNLYVRHCNSA

SEQ ID NO: 1064 - protein, 617 aa, Huperzia tetratoides
MVWAGDQEMVQKEPDRMVAQATAREALQALGRGFDVTLDLRLAYCKGPPGSCLIELDEEEKSEILIPGGAAIIPDVSRDIKCDKGERTHFSSEVLPFEQMSERFNQALSISGKVPLGLFNTMFSLNGTWQSDASATKALAVDGWFISLYNMQISKTPQSLKEEVIKAVPPFWEPAALASFIEKYGTHIIMSVKIGGKDVVYIRQYQSSPLSPGEIKRYLKEIADQRFAEGSEQFMSNTRSNEKSPIPLTSTSHAHRLQMANAYTSASFTTKGDVEVIFRRRGGDCMVKHHSDWLATVPSSPDVIAMTFIPITSLLNEVPGSGFLSHAISLYLQYKPPIEELQFFLEFQISRQWSPGFDLPLVPQRKEPVCPSLQFSLMGPKLYVSTAQVTVGRRPVTGLRLCLEGKKGNRLAIHLQHLSNLPKILQPHWDQHIPIGLPVWKEPEEQDSKWFEHVQWKSFSHVSTAPIEYRRESYVGETSAVYIVTGAQLRVWDFGLKNVLFLRLLFLKVPGCSVKRSIWDHAPQASQKSGLFSQFGLSTNFTSAHKAKPAPVVLNSAVFPEGPPAPAQNLKLLKFVDVKEMSKGAQDVPGHWLVTGAKLDVDKGKIALRLKYSLLHY

SEQ ID NO: 1065 - protein, 450 aa, Huperzia phlegmaria
MKERIYHYSSHMGIDWAGDQMAYREAERTIAQSTAIEALQCLGRGFDVTLDLRLAYCKGPSGSLLVELSEETYPEIVLPGGVVITNVSKDIKCDKGERTHFRSEVLTFHQMSTRFNEALSITGKMPLGLFNTMFSFNGTWQGDASETKALALDGWFITLYNMQITKPELSLNEEVKKAVPSSWEPAALARFIEKYGTHIIVSVKLGGKDVVYLKQYESSLLSSAEVQKYLKVTADQRFSEEAGLNISDTHLKDKLPDPLTSTNHAHRVPTASNFTSSSFTTIKDVEVILRRRGGDSLVKRHNDWLATVSSAPDVVSMSFVAISSLLNGVPGSGFLSHAVNLYLRYKPPIEELQFFLEFQIPKQWSPGFDLPLGPQRKGPVCPALQFSLMGPKLYVCTTQVTVGRRPVTGLRLFLEGKKGNRLTIHLQHLSNLPKILQPHWDQHIAIGPPI

SEQ ID NO: 1066 - protein, 624 aa, Platycerium bifurcatum
MGIDWAGDQMDWAGDQMAYREAERTIAQSTAIEALQCLGRGFDVTLDLRLAYCKGPSGSLLVELSEETYPEIVLPGGVVITNVSKDIKCDKGERTHFRSEVLTFHQMSTRFNEALSITGKMPLGLFNTMFSFNGTWQGDASETKALALDGWFITLYNMQITKPELSLNEEVKKAVPSSWEPAALARFIEKYGTHIIVSVKLGGKDVVYLKQYESSLLSSGEVQKYLKVIADQRFSEEAGQNISDTHLKDKLPDPLTSTNHAHRLQMASNFTSSSFTTIKDVELIVRRRGGDSLVKRHNDWLATVSSAPDVVSMSFVAISSLLNGVPGSGFLSHAVNLYLRYKPPIEELQFFLEFQIPKLWSPGFDLPLGPQRKGPVCPAMQFSLMGPKLYVCTTQVTVGRRPVTGLRLFLEGKKGNRLTIHLQHLSNLPKILQPHWDQHIAIGPPIWKEPEEQDSKWFEPVQWKSFSHVSTAPIEYLKESYVGETSAVYIVTGAQLRVWDFGLKNVLFLRLLFLKVPGCSVKRTIWDHSPESSQKSGLFSQLAVSKTFSSAHKAKPAPVVLNSAVLPEGPHVPVQSLKFLKFVDVKEMMKGAQDMPGHWLVTGAKLDVDKGKIALRVKYSLLHY

SEQ ID NO: 1067 - protein, 512 aa, Huperzia tetratoides
MSERFNQALSISGKMPLGLFNTMYSLNGTWQSDASATKSLALDGWFISLYNLQLRKASLTLKEEVKEAVPSVWEPAALARFIDKYGTHIIESVKVGGKDVVYTRQYQSSPLTSGDIQKYLKELADQRFAEGSGTNNVNMRAKEKSPDPFTVTNHAHRLQLASTNTSSSFTAKGDVEVNFKRRGGDNLVRFHGDWLATVPLSPDVISMSFVPITSLLNGVPGSGFLSHAVNLYLRYKPPIEELRSFLEFQIPRQWSPGFDLPLGPQRKEPACPSLQFSFMGPKLYINTAQVIVGRRPVTGLQLFLEGKKGNRLAIHLQHLSNLPKILQPHWGQHISVGPPVWKQPEEQDTKWFEPVQWKSFSHVSLSNLPKILQPHWGQHISVGPPVWKQPEEQDTKWFEPVQWKSFSHVSTAPIEYGKEDDLIANIVTGAQLQVWELGAKKVLFLRLLFSKVPGCSIKTSFWDHTPQSSQKSGLFSQLGLSTNFTSARKAKPAAVILNSAIFPEGPPAAVLC

SEQ ID NO: 1068 - protein, 322 aa, Huperzia phlegmaria
MVWAGHQQMAQKEPGKLAAEVTAREAVQAIGRGFDVTLDLRLAYCKGPAGSRLIELDEEKNVDMVIPGGGFILQGVSRDIRCDKGERTRFRSEVLSFHHMSERFNQALCISGKMPLGLFNAMYNLNGTWQSDASATKSLALDGWFISLYNLQLRKASLTLKEEVKEAVPSVWEPAALARFIDKYGTHIIESVKVGGKDVVYTRQYQSSPLTPGDIQKYLKELADQRFAEGSGQNNVNMRAKEKSLDPFTVTNHAHRLQLASTNTSSSFTAKGDVEVNYKRRGGDNLVRFHGDWLATVPLSPDVVSMSFVPITSLLNGGDWYK

SEQ ID NO: 1069 - protein, 606 aa, Huperzia squarrosa
MTQTEPDRMVAQATAREALQALGRGFDVTLDLRLAYCKGPPGSCLIELDEEEKSDILIPGGAAIIPDVSRDIKCDNGERTHFSSEVLPFEQMSERFNQALSISGKMPLGLFNTMYSLNGTWQSDASATKALAVDGWFISLYNMQISKTPQSLKEEVIKAVPPFWEPAALASFIEKYGTHIIMSVKIGGKDVVYIRQYQSSPLSPGEIKRYLKEIADQRFAEGSEQFMSNVRSNEKSPIPLTSTSHAHRLQMANAYTSASFTTKGDVEVILRRRGGDCMVKHHSDWLATVPFSPDVIAMSFIPITALLNGVPGSGFLSHAINLYLRYKPPIEELRLFLEFQIPRQWSPGFDLPFGCQRKEPVYPSLQFSLMGPKLYVSTAQVTVGRRPVTGLRLCLEGKKGNRLAIHLQHLSNLPKILQPHWDQHLPIGLPVWKEPEEQDSKWFEPVQWKSFSHVSTAPIEYRRESYVGETSAVYIVTGAQLRVWDFGLKNVLFLRLLFLKVPGCSVKRTVWDHSPESSQKSGLFPQLGLSTIFSSARKAKPAPVVLNSAVFPEGAVQNLKFLKFVDIKEMTKGAQDMPGHWLVTGAKLDVDKGKIALRLKYSLLHY

SEQ ID NO: 1070 - protein, 617 aa, Huperzia nummarifolia
MVWAGDQEMAQTEPDRMAAQAIAREALQALGRGFDVTLDLRLAYCKGPSGSRIIEFDEKSNLDLVIPGGAAIIPNVSGDIRCEKGERKHFRSDVLPFHQMAERFNEALNISGKVPLGFFNTMFSLNGTWQSDASATKALAVDGWFMSLYNMQISKTPQNLKEEVKKAVPPFWEPAALARFIEKYGTHIIMSVKIGGKDVVYIRQYQSSTLSPGEIKKYLKEIADQRFAEGSGHDISNMQSKEKSSDPLTSTNHAHRLQMANTHTSASFTAKGDVEVIFRRRGGDCTVKHHSDWLATVPSSPDVMAMTFIPITSLLNEVPGSGFLSHAINLYLRYKPPIEELQFFLEFQIPRQWSPGFDLPIVPQRKEPVCPSLQFSLMGPKIYVSTNQVTVGRRPVTGLRLFLEGKKGNRLAIHLQHLSSLPKILQPHWDQHIPIGLPVWKEPEEQDSKWFEPVQWKSFSHVSTAPIEYLKESYVGETSAVYIVTGAQLRVWDFGLKNVLFLRLLFLKVPGCSVKRSVWDHTPQASQKSGLFSQFGLSTNFTSAHKAKPAPVVLNSAVFPEGPPAPAQNLKLLKFVDVKEMSKGAQDVPGHWLVTGAKLDVDKGKIALRLKYSLLHY

SEQ ID NO: 1071 - protein, 587 aa, Huperzia nummarifolia
MVWAGDQEMAQTEPDRMAAQAIAREALQALGRGFDVTLDLRLAYCKGPSGSRIIEFDEKSNLDLVIPGGAAIIPNVSGDIRCEKGERKHFRSDVLPFHQMAERFNEALNISGKVPLGFFNTMFSLNGTWQSDASATKALAVDGWFMSLYNMQISKTPQNLKEEVKKAVPPFWEPAALARFIEKYGTHIIMSVKIGGKDVVYIRQYQSSTLSPGEIKKYLKEIADQRFAEGSGHDISNMQSKEKDVEVIFRRRGGDCTVKHHSDWLATVPSSPDVMAMTFIPITSLLNEVPGSGFLSHAINLYLRYKPPIEELQFFLEFQIPRQWSPGFDLPIVPQRKEPVCPSLQFSLMGPKIYVSTNQVTVGRRPVTGLRLFLEGKKGNRLAIHLQHLSSLPKILQPHWDQHIPIGLPVWKEPEEQDSKWFEPVQWKSFSHVSTAPLEYLVESYVGEINSTYIVTGAQLRVWDFGIKNVLFLRLLFCRVPGCSIKRSFWDHTPQASQKSNLFSQLGLSSISSARKAKPVPIVLNSAVFPDDPPQSTQTHKLLKFVDIKEMTKGAQDKPGHWLVTGAKLDVDGGKIALGVKYSLLHY

SEQ ID NO: 1072 - protein, 518 aa, Huperzia goebelii (Holub)
MAERFNEALNISGKVPLGLFNTVFSLNGTWQSDASAIKALAVDCWVISLYNMQISKTPKNLKEEVKKAVPPFWEPAALARFIEKYGTHIIMSVKIGGRDVVYIKQYQSSTLSPEEIKRYLREIADQRFAEGSGQGISNMQSKEKSSDLLTSANHAHRLQMANTHTSTSFTAKGDVEVIFRRRGGDCTVTHHSDWLATVPSSPDVVAMTFIPITSLLNEVPGSGFLSHAINLYLRYKPPIEELQFFLEFQIPRQWSPGFDLPLVPQRKEPVCPSLQFSLMGPKVYVSTNQVTVGRRPVTGLRLSLEGKKGNRLAIHLQHLSNLPKILQPHWDQHIPIGLPVWKEPEEQDSKWFEPVQWKSFSHVSTAPIEYLKESYVGETSAVYIVTGAQLRVWDFGLKNVLFLRLLFLKVPGCSVKRTVWDHSPESSQKSGLFSQLGLSTTFSSASKAKPVPVVLNSAVFPEGPPVPVQNLKFLKFVDVKEMMKGAQDMPGHWLVTGAKLDVDKGKIALRVKYSLLHY

SEQ ID NO: 1073 - protein, 333 aa, Huperzia salvinioides
MVWAGDQEMAQTDSDRMAAQATAREALQALGRGFDVTLDLRLAYCKGPSGSRIIEFDEEANLDLVIPGGAAIIPNVSRDIRCEKGERKHFRSDVLPFHQMAERFNEALNISGKVPLGLFNTMFSFNGTWQSDASAIKALAVDCWVISLYNMQISKTLKNLKEEVKKAVPPFWEPAALARFIEKYGTHIIMSVKIGGRDVVYIKQYQSSTLSPEEIKRYLREIADQRFAEGSGQGISNMQSKEKSSDPLTSANHAHRLQMANTHTSTSFTAKGDVEVIFRRRGGDCTVKHHSDWLDTVPSSPDVVEMSFIPITALLNGVPGSGFLSHAIKLYLR

SEQ ID NO: 1074 - protein, 443 aa, Huperzia nummarifolia
MSLYNMQISKTPQNLKEEVKKAVPPFWEPAALARFIEKYGTHIIMSVKIGGKDVVYIRQYQSSTLSPGEIKKYLKEIADQRFAEGSGHDISNMQSKEKDVEVIFRRRGGDCTVKHHSDWLATVPSSPDVMAMTFIPITSLLNEVPGSGFLSHAINLYLRYKPPIEELQFFLEFQIPRQWSPGFDLPIVPQRKEPVCPSLQFSLMGPKIYVSTNQVTVGRRPVTGLRLFLEGKKGNRLAIHLQHLSSLPKILQPHWDQHIPIGLPVWKEPEEQDSKWFEPVQWKSFSHVSTAPIEYLKESYVGETSAVYIVTGAQLRVWDFGLKNVLFLRLLFLKVPGCSVKRTIWDHSPESSQKSGLFSQLAVSKTFSSAHKAKPAPVVLNSAVLPEGPHVPVQSLKFLKFVDVKEMMKGAQDMPGHWLVTGAKLDVDRGKIALRVKYSLLHY

SEQ ID NO: 1075 - protein, 603 aa, Huperzia nummulariifolia
MVWAGDQEMVQNEPDRMAAQAIAREALQALGRGFDVTLDLRLAYCKGPPGSCLIELDEEEKSDILIPGGAAIIPDVSRDIKCDKGERTHFSSEVLPFEQMSERFNQALCISGKMPLGLFNSMYNLNGTWQSDASATKALAVDCWVISLYNMQIFKTPKNLKEEVKKAVPPFWEPAALARFIEKYGTHIIMSVKIGGKDVVYIRQYQSSTLSPGEIKKYLKEIADQRFAEGSGHDISNMQSKEKSSDPLTSTNHAHRLQMANTHTSASFTAKGDVEVIFRRRGGDCTVKHHSDWLATVPSSPDVMAMTFIPITSLLNEVPGSGFLSHAINLYLRYKPPIEELQFFLEFQIPRQWSPGFDLPLVPQRKEPVCPSLQFSLMGPKIYVSTNQVTVGRRPVTGLRLFLEGKKGNRLAIHLQHLSNLPKILQPHWDQHIPIGLPVWKEPEEQDSKWFEPVQWKSFSHVSTAPIEYLKESYVGETSAVYIVTGAQLRVWDFGLKNVLFLRLLFLKVPGCSVKRTIWDHSPESSQKSGLFSQLAVSKTFSSAHKAKPAPVVLNSAVLPEGPHVPVQSLKFLKFVDVKEMMKGAQDMPGHWLVTGAKLDVDK

SEQ ID NO: 1076 - protein, 651 aa, Huperzia nummarifolia
MVWAGDQEMVQNEPDRMAAQAIAREALQALGRGFDVTLDLRLAYCKGPSGSRIIEFDEKSNLDLVIPGGAAIIPNVSGDIRCEKGERKHFRSDVLPFHQMAERFNEALNISGKVPLGFFNTMFSLNGTWQSDASATKALAVDCWVISLYNMQIFKTPKNLKEEVKKAVPPFWEPADGWFMSLYNMQISKTPQNLKEEVKKAVPPFWEPAALARFIEKYGTHIIMSVKIGGKDVVYIRQYQSSTLSPGEIKKYLKEIADQRFAEGSGHDISNMQSKEKSSDPLTSTNHAHRLQMANTHTSASFTAKGDVEVIFRRRGGDCTVKHHSDWLATVPSSPDVMAMTFIPITSLLNEVPGSGFLSHAINLYLRYKPPIEELQFFLEFQIPRQWSPGFDLPIVPQRKEPVCPSLQFSLMGPKIYVSTNQVTVGRRPVTGLRLFLEGKKGNRLAIHLQHLSSLPKILQPHWDQHIPIGLPVWKEPEEQDSKWFEPVQWKSFSHVSTAPIEYLKESYVGETSAVYIVTGAQLRVWDFGLKNVLFLRLLFLKVPGCSVKRSVWDHTPQASQKSGLFSQFGLSTNFTSAHKAKPAPVVLNSAVFPEGPPAPAQNLKLLKFVDVKEMSKGAQDVPGHWLVTGAKLDVDKGKIALRLKYSLLHY

SEQ ID NO: 1077 - protein, 436 aa, Huperzia tetratoides
MGMVWAGDQMAYREAERTIAQSTAIEALQCLGRGFDVTLDLRLAYCKGPSGSRLVELSEETYPEIVLPGGVVIPNVSKDIKCDKGERTHFRSEVLTFHQMSTRFNEALSITGKMPLGLFNTMFSFNGTWQGDASETKALALDGWFITLYNMQITKPELSLNEEVKKAVPSSWEPAALARFIEKYGTHIIVSVKLGGKDVVYLKQFESSLLSSGEVQKYLKVIADQRFSEEAGQNISDTRLKDKSPDPLTSTNHAQRLQMASNVTSSSFSPIKDVEVILRRRGGDSLVKHHNDWLATVSSAPDVVSMSFVAISSLLNGVPGSGFLSHAVNLYLRYKPPIEELQFFLEFQIPKQWSPGFDLPLGPQRKGPVCPAMQFSLMGPKLYVCTTQVTVGRRPVTGLRLFLEGKKGNRLTIHLQHLSNLPKILQPHWDQHIASW

SEQ ID NO: 1078 - protein, 333 aa, Huperzia carinata
MVWARDQEMAQTDSDRMAAQATAREALQALGRGDEEANLDLVIPGGAAIIPNVSRDIRCEKGERKHFRSDVLPFHQMAERFNEALNISGKVPLGFFNTVFSLNGTWQSDASATKALAVDCWVISLYNMQISKTPKNLKEEVKKAVPPFWEPAALARFIEKYGTHIIMSVKIGGRDVVYIKQYQSSTLSPEEIKRYLREIADQRFAEGSGQGISNMQSKEKSSDPVTSANHAHRLQMANTHTSTSFKAKGDVEVIFRRKGGDCTVKHHSDWLATVPSSPDVVEMTFIPITSLLNEVPGSGFLSHAIKLYLRYKPPIEELQFFLEFQIPRVVSRF

SEQ ID NO: 1079 - protein, 617 aa, Huperzia nummulariifolia
MVWAGDQEMVQNEPDRMAAQAIAREALQALGRGFDVTLDLRLAYCKGPPGSCLIELDEEEKSDILIPGGAAIIPDVSRDIKCDKGERTHFSSEVLPFEQMSERFNQALCISGKMPLGLFNSMYNLNGTWQSDASATKALAVEGWFISLYNMQISKIPLRLKEEVKKAVPPCWEPAALASFIEKYGTHIITSVKIGGKDVVYIRQYQSSPLSPGEIKSYLKEIADQRFAEGSEQFMLNMRSNEKSPIPLTSTSHAHRLQMANAYTSASFTTKGDVEVILRRRGGDCMVKHHSDWLATVPFSPDVIAMSFIPITALLNGVPGSGFLSHAINLYLRYKPPIEELQFFLEFQIPRQWSPGFDLPLVPQRKEPVCPSLQFSLMGPKIYVSTNQVTVGRRPVTGLRLFLEGKKGNRLAIHLQHLSNLPKILQPHWDQHIPIGLPVWKEPEEQDSKWFEPVQWKSFSHVSTAPIEYLKESYVGETSAVYIVTGAQLRVWDFGLKNVLFLRLLFLKIPGCSVKRSVWDHTPQASQKSGLFSQFGLSTNFTSAHKAKPAPVVLNSAVFPEGPPAPAQNLKLLKFVDVKEMSKGAQDVPGHWLVTGAKLDVDKGKIALRLKYSLLHY

SEQ ID NO: 1080 - protein, 613 aa, Huperzia nummulariifolia (Blume)
MVWAGDQEMAQTDSDRMAAQATAREALQALGRGFDVTLDLRLAYCKGPAGSRLIELDEEKNVDMVIPGGGFVLQGVSRDIRCDKGERTRFRSEVLSFHHMSERFNQALCISGKMPLGLFNAMYNLNGTWQSDASATKSLALDGWFISLYNLQLRKASLTLKEEVKEAVPSVWEPAALARFIDRYGTHIIESVKVGGKDVVYTRQYQSSPLTPGDIQKYLKELADQRFAEGSGQNNVNMRAKEKSLDPFTVTNHAHRLQLASTNTSSSFTAKGDVEVNYKRRGGDNLVRFHGDWLATVPLSPDVVSMSFVPITSLLNGVPGSGFLSHAINLYLRYKPPIEELRSFLEFQIPRQWCPGFDLPLGPQRKEPVCPSLQFSFMGPKLYINTAQVIVGRRPVTGLQLFLEGKKGNRLAIHLQHLSNLPKILQPHWGQHISVGDPVWKQPEEQETKWFEPVQWKSFSHVSTAPIEYGKEDDLIANIVTGAQLQVWDLGAKKVLFLRLLFSKVPGCSIKTSFWDHTPQSSQKSGLFSQLGLSTNFTSARKAKPAAVILNSAIFPEGPPAAVQKLKLLKFVDVKEMSKGAQDVPGHWLVTGAKLDVDKGKIALRVKYSLLHY

SEQ ID NO: 1081 - protein, 570 aa, Huperzia nummulariifolia (Blume)
MRERGIIEFDEEANLDLVIPGGAAIIPNVSRDIRCEKGERKHFRSDVLPFHQMAERFNDALNISGKVPSGFFNSVFSLNGTWQSDASAIKALAVDCWVISLYNMQISKTPQNLKEEVKKAVPPFWEPAALARFIEKYGTHIIMSVKIGGRDVVYIKQYQSSTLSPEEIKRYLREIADQRFAEGSGQGISNMQSKEKSSDPLTSANHAHRLQMANTHTSTSFTAKGDVEVILRRRGGDCMVKHHSDWLATVPFSPDVIAMSFIPITALLNGVPGSGFLSHAIKLYLRYKPPIEELQFFLEFQIPRQWSPGFDLPLVPQRKEPVCPSLQFSLMGPKVYVSTNQVTVGRRPVTGLRLSLEGKKGNRLAIHLQHLSNLPKILQPHWDQHIPIGLPVWKEPEEQDSKWFEPVQWKSFSHVSTAPIEYLKESYVGETSAVYIVTGAQLRVWDFGLKNVLFLRLLFLKVPGCSVKRTVWDHSPESSQKSGLLSQLGLSTTFSSASKAKPAPVVLNSAVFPEGPPVPVQNLKFLKFVDVKEMMKGAQDMPGHWLVTGAKLDVDKGKIALRVKYSLLHY

SEQ ID NO: 1082 - protein, 396 aa, Huperzia phlegmoides
MVWAGDQEMAQTDSDRMAAQATAREALQALGRGFDVTLDLRLAYCKGPPGSCLIELDEEEKSDILIPGGAAIIPDVSRDIKCDKGERTHFSSEVLPFEQMSERFNQALSVPGKVPLGLFNTMFSLNGTWQSDASATKALAVDGWFISLYNMQISKIPLRLKEEVKKAVPPCWEPAALASFIEKYGTHIIMSVKIGGKDVVYIRQYQSSPLSPGEIKRYLKEIADQRFAEGSEQFMLNMRSNEKSPIPLTSTSHAHRLQMANAYTSTSFTTKGDVEVIFRRRGGDCTVKHHSDWLATVPSSPDVVAMTFIPITSLLNEVPGSGLLSHAINLYLRYKPPIEELQFFLEFQIPRQWSPGFDLPIVPQRKEPVCPSLQFSLMGPKVYVSTNQVEAVVSRF

SEQ ID NO: 1083 - protein, 617 aa, Huperzia nummulariifolia (Blume)
MGIDWAGDQMAYREAERTIAQSTAIEALQCLGRGFDVTLDLRLAYCKGPSGSLLVELSEETYPEIVLPGGAVITNVSKDIKCDKGERTHFRSEVLTFHQMSTRFNEALSITGKMPLGLFNTMFSFNGTWQGDASETKALALDGWFITLYNMQITKPELSLNEEVKKAVPSSWEPAALARFIEKYGTHIIVSVKLGGKDVVYLKQYESSLLSSGEVQKYLKVTADQRFSEEAGQNIADTHLKDKLPDPLTSTNHAHRLQTVGNITSSSFTTIKDVEVILRRRGGDSLVKRHNDWLATVSSAPDVVSMSFVAISSLLNGVPGSGFLSHAVNLYLRYKPPIEELQFFLEFQIPKQWSPGFDLPLVPQRKEPVCPSLQFSLMGPKVYVSTNQVTVGRRPVTGLRLSLEGKKGNRLAIHLQHLSNLPKILQPHWDQHIPIGLPVWKEPEEQDSKWFEPVQWKSFSHVSTAPIEYLKESYVGETSAVYIVTGAQLRVWDFGLKNVLFLRLLFLKVPGCSVKRTVWDHSPESSQKSGLLSQLGLSTTFSSASKAKPAPVVLNSAVFPEGPPVPVQNLKFLKFVDVKEMMKGAQDMPGHWLVTGAKLDVDKGKIALRVKYSLLHY

SEQ ID NO: 1084 - protein, 614 aa, Huperzia squarrosa
MGMVWAGDQMAYREAERTIAQSTAIEALQCLGRGFDVTLDLRLAYCKGPSGSRLVELSEETYPEIVLPGGVVIPNVSKDIKCDKGERTHFRSEVLPFHQMSTRFNEALSITGKMPLGLFNTMFNFNGTWQGDASETKALALDGWFITLYNMQITKPELSLNEEVKKAVPSSWEPAALARFIEKYGTHIIVSVKLGGKDVVYLKQYESSLLSSGEVQKYLKGIADQRFSEEAGQNISDTRLKDKLPDPLTSTNHAHRLQMASNFTSSSFTTIKDVEVILRRRGGDSLVKHHNDWLATVSSAPDVVSMSFVAISSLLNGVPGSGFLSHAVNLYLRYKPPIEELQFFLEFQIPKQWSPGFDLPFGCQRKEPVYPSLQFSLMGPKVYVSTNQVTVGRRPVTGLRLFLEGKKGNRLAIHLQHLSNLPKILQPHWDQHLPIGLPVWKEPEEQDSKWFEPVQWKSFSHVSTAPIEYRRESYVGETSAVYIVTGAQLRVWDFGLKNVLFLRLLFLKVPGCSVKRTVWDHSPESSQKSGLFPQLGLSTIFSSARKAKPAPVVLNSAVFPEGAVQNLKFLKFVDIKEMTKGAQDMPGHWLVTGAKLDVDKGKIALRVKYSLLHY

SEQ ID NO: 1085 - protein, 615 aa, Huperzia salvinioides
MVWAGDQEMAQTDSDRMAAQATAREALQALGRGFDVTLDLRLAYCKGPPGSCLIELDEEEKSDILIPGGAAIIPDVSRDIKCDKGERTHFSSEVLPFEQMSERFNQALSIPGKVPLGLFNTMFSLNGTWLSDASATKALAVDGWFISLYNMQISKIPLHLKEEVQKAVPPCWEPAALASFIEKYGTHIIMSVKIGGKDVVYIRQYQSSPLSPGEIKRYLKEIAGQRFAEGSEQVMLNMRSNEESPIPLTSHAHRLQMANAYTSASFTTKGDVEVILRRRGGDCMVKHHSDWLATVPFSPDVIAMSFIPITALLNGVPGSGFLSHAIKLYLRYKPPIEELQFFLEFQIPRQWSPGFDLPLVPQRKEPVCPSLQFSLMGPKVYVSTNQVTVGRRPVTGLRLSLEGKKGNRLAIHLQHLSNLPKILQPHWDQHIPIGLPVWKEPEEQDSKWFEPVQWKSFSHVSTAPIEYLKESYVGETSAVYIVTGAQLRVWDFGLKNVLFLRLLFLKVPGCSVKRTVWDHSPESSQKSGLLSQLGLSTTFSSASKAKPAPVVLNSAVFPEGPPVPVQNLKFLKFVDVKEMSKGAQDVPGHWLVTGAKLDVDKGKIALRVKYSLLHY

SEQ ID NO: 1086 - protein, 613 aa, Huperzia phlegmaria
MVWAGHQQMAQKEPGKLAAEVTAREAVQAIGRGFDVTLDLRLAYCKGPAGSRLIELDEEKNVDMVIPGGGFILQGVSRDIRCDKGERTRFRSEVLSFHHMSERFNQALCISGKMPLGLFNAMYNLNGTWQSDASATKSLALDGWFISLYNLQLRKASLTLKEEVKEAVPSVWEPAALARFIDKYGTHIIESVKVGGKDVVYTRQYQSSPLTPGDIQKYLKELADQRFAEGSGQNNVNMRAKEKSLDPFTVTNHAHRLQLASTNTSSSFTAKGDVEVNYKRRGGDNLVRFHGDWLATVPLSPDVVSMSFVPITSLLNGVPGSGFLSHAINLYLRYKPPIEELRSFLEFQIPRQWCPGFDLPLGPQRKEPVCPSLQFSVMGPKLYINTAQVIVGRRPVTGLQLFLEGKKGNRLAIHLQHLSNLPKILQPHWGQHISVGDPVWKQPEEQDTKWFEPVQWKSFSHVSTAPIEYGKEDDLIANIVTGAQLQVWDLGAKKVLFLRLLFSKVPGCSIKTSFWDHTPQSSQKSGLFSQLGLSTNFTSARKAKPAAVILNSAIFPEGPPAAVQKLKLLKFVDVKEMTKGAQDTPGHWLVTGARLDADRGKIALRVKYALLLY

SEQ ID NO: 1087 - protein, 588 aa, Huperzia nummarifolia
MVWAGDQEMAQTEPDRMAAQAIAREALQALGRGFDVTLDLRLAYCKGPSGSRIIEFDEKSNLDLVIPGGAAIIPNVSGDIRCEKGERKHFRSDVLPFHQMAERFNEALNISGKVPLGFFNTMFSLNGTWQSDASATKALAVDGWFMSLYNMQISKTPQNLKEEVKKAVPPFWEPAALARFIEKYGTHIIMSVKIGGKDVVYIRQYQSSTLSPGEIKKYLKEIADQRFAEGSGHDISNMQSKEKDVEVIFRRRGGDCTVKHHSDWLATVPSSPDVMAMTFIPITSLLNEVPGSGFLSHAINLYLRYKPPIEELQFFLEFQIPRQWSPGFDLPIVPQRKEPVCPSLQFSLMGPKIYVSTNQVTVGRRPVTGLRLFLEGKKGNRLAIHLQHLSSLPKILQPHWDQHIPIGLPVWKEPEEQDSKWFEPVQWKSFSHVSTAPIEYLKESYVGETSAVYIVTGAQLRVWDFGLKNVLFLRLLFLKVPGCSVKRSVWDHTPQASQKSGLFSQFGLSTNFTSAHKAKPAPVVLNSAVFPEGPPAPAQNLKLLKFVDVKEMSKGAQDVPGHWLVTGAKLDVDKGKIALRLKYSLLHY

SEQ ID NO: 1088 - protein, 617 aa, Huperzia nummulariifolia (Blume)
MVWAGDQEMAQTDSDRMAAQATAREALQALGRGFDVTLDLRLAYCKGPSGSRIIEFDEEANLDLVIPGGAAIIPNVSRDIRCEKGERKHFRSDVLPFHQMAERFNDALNISGKVPSGFFNSVFSLNGTWQSDASAIKALAVDCWVISLYNMQISKTPQNLKEEVKKAVPPFWEPAALARFIEKYGTHIIMSVKIGGRDVVYIKQYQSSTLSPEEIKRYLREIADQRFAEGSGQGISNMQSKEKSSDPLTSANHAHRLQMANTHTSTSFTAKGDVEVIFRRRGGDCTVKHHSDWLDTVPSSPDVVEMTFIPITSLLNGVPGSGFLSHAIKLYLRYKPPIEELQFFLEFQIPRQWSPGFDLPLVPQRKEPVCPSLQFSLMGPKVYVSTNQVTVGRRPVTGLRLSLEGKKGNRLAIHLQHLSNLPKILQPHWDQHIPIGLPVWKEPEEQDSKWFEPVQWKSFSHVSTAPIEYLKESYVGETSAVYIVTGAQLRVWDFGLKNVLFLRLLFLKVPGCSVKRTVWDHSPESSQKSGLLSQLGLSTTFSSASKAKPAPVVLNSAVFPEGPPVPVQNLKFLKFVDVKEMMKGAQDMPGHWLVTGAKLDVDKGKIALRVKYSLLHY

SEQ ID NO: 1089 - protein, 320 aa, Huperzia phlegmoides
MVWAGDQEMAQTDSDRMAAQATAREALLEFDEEANLDLVIPGGAAIIPNVSGDIRCEKGERTHFISDVLPFHEMAERFNDALNISGKVPLGLFNTMFSFNGTWQSDASATKALAVDCWVISLYNMQISKTPKNLKEEVKKAVPPFWEPAALARFIEKYGTHIIMSVKIGGKDVVYLRQYQSSTLSPEEIKRYLREIADQRFAEGSGHDISNMQSKGQYQSSTLSPEEIKRYLREIADQRFAEGSGQGISNMQSKEKSSDPLTSTNHAHRLQMANTHTSASFTAKGDVEVIFRRRGGDCTVKHHSDWLATVPSSPDVVAMT

SEQ ID NO: 1090 - protein, 617 aa, Huperzia phlegmoides
MVWAGDQEMAQTDSDRMAAQATAREALQALGRGFDVTLDLRLAYCKGPPGSCLIELDEEEKSDILIPGGAAIIPDVSRDIKCDKGERTHFSSEVLPFEQMSERFNQALSVPGKVPLGLFNTMFSLNGTWQSDASATKALAVDGWFISLYNMQISKIPLRLKEEVKKAVPPCWEPAALASFIEKYGTHIIMSVKIGGKDVVYIRQYQSSPLSPGEIKRYLKEIADQRFAEGSEQFMLNMRSNEKSPIPLTSTSHAHRLQMANAYTSTSFTTKGDVEVIFRRRGGDCTVKHHSDWLATVPSSPDVVAMTFIPITSLLNEVPGSGLLSHAINLYLRYKPPIEELQFFLEFQIPRQWSPGFDLPIVPQRKEPVCPSLQFSLMGPKVYVSTNQVTVGRRPVTGLRLFLEGKKGNRLAIHLQHLSNLPKILQPHWDQHIPIGLPVWKEPEEQDSKWFEPVQWKSFSHVSTAPIEYLKESYVGETSAVYIVTGAQLRVWDFGLKNVLFLRLLFLKVPGCSVKRTVWDHSPESSQKSGVFSQLGLSTTFSSASKAKPAPVVLNSAVFPEGPPVPVQNLKFLKFVDVKEMMKGAQDMPGHWLVTGAKLDVDKGKIALRVKYSLLHY

SEQ ID NO: 1091 - protein, 616 aa, Huperzia squarrosa
MGMVWAGDQMAYREAERTIAQSTAIEALQCLGRGFDVTLDLRLAYCKGPSGSRLVELSEETYPEIVLPGGVVIPNVSKDIKCDKGERTHFRSEVLPFHQMSTRFNEALSITGKMPLGLFNTMFNFNGTWQGDASETKALALDGWFITLYNMQITKPELSLNEEVKKAVPSSWEPAALARFIEKYGTHIIVSVKLGGKDVVYLKQYESSLLSSGEVQKYLKGIADQRFSEEAGQNISDTRLKDKLPDPLTSTNHAHRLQMASNFTSSSFTTIKDVEVILRRRGGDSLVKHHNDWLATVSSAPDVVSMSFVAISSLLNGVPGSGFLSHAVNLYLRYKPPIEELQFFLEFQIPKQWSPGFDLPFGCQRKEPVYPSLQFSLMGPKVYVSTNQVTVGRRPVTGLRLFLEGKKGNRLAIHLQHLSNLPKILQPHWDQHLPIGLPVWKEPEEQDSKWFEPVQWKSFSHVSTAPLEYLVESYVGEINATYIVTGAQLRVWDFGIKNVLFLRLLFCRVPGCSIKRSFWDHTPQASQKSNLFSQLGLSSTSSARKAKPVPIVLNSAIFPDDPPQSTQTHKLLKFVDIKEMTKGAQDKPGHWLVTGAKLDVDGGKIALGVKYSLLHY

SEQ ID NO: 1092 - protein, 518 aa, Huperzia phlegmaria
MAERFNEALSISGKVPLGLFNTVFSLNGTWQSDASAIKALAVDCWVISLYNMQISRTPKNLKEEVKKAVPPFWEPAALARFIEKYGTHIIMSVKIGGKDVVYLRQYQSSTLSPEEIKRYLREIADQRFAEGSGQGISNMQSKEKSSDPLTSTNHAHRLQMANAHTSASFTAKGDVEVIFRRRGGDCTVKHHSDWLDTVPSSPDVVEMTFIPITSLLNEVPGSGFLSHAIKLYLRYKPPIEELQFFLEFQIPRQWSPGFDLPIVPQRKEPVCPSLQFSLMGPKVYVSTNQVTVGRRPVTGLRLFLEGKKGNRLAIHLQHLSNLPKILQLHWDQHIPIGLPVWKEPEEQDSKWFEPVQWKSFSHVSTAPIEYLKESYVGETSAVYIVTGAQLRVWDFGLKNVLFLRLLFLKVPGCSVKRTVWDHSPESSQKSGLFSQLGLSTTFSSASKAKPAPVVLNSAVFPEGPPVPVQNHKFLKFVDVKEMMKGAQDMPGHWLVTGAKLDVDKGKIALRVKYSLLHY

SEQ ID NO: 1093 - protein, 351 aa, Huperzia nummarifolia
MQSKEKDVEVIFRRRGGDCTVKHHSDWLATVPSSPDVMAMTFIPITSLLNEVPGSGFLSHAINLYLRYKPPIEELQFFLEFQIPRQWSPGFDLPIVPQRKEPVCPSLQFSLMGPKIYVSTNQVTVGRRPVTGLRLFLEGKKGNRLAIHLQHLSSLPKILQPHWDQHIPIGLPVWKEPEEQDSKWFEPVQWKSFSHVSTAPIEYLKESYVGETSAVYIVTGAQLRVWDFGLKNVLFLRLLFLKVPGCSVKRTIWDHSPESSQKSGLFSQLAVSKTFSSAHKAKPAPVVLNSAVLPEGPHVPVQSLKFLKFVDVKEMMKGAQDMPGHWLVTGAKLDVDRGKIALRVKYSLLHY

SEQ ID NO: 1094 - protein, 617 aa, Huperzia phlegmaria
MVWAGDQEMVQNEPDRMAAQATAREALQALGRGFDVTLDLRLAYCKGPPGSCLIELDEEEKSDILIPGGAAIIPDVSRDIKCDKGERTHFSSEVLPFEQMSERFNQALSIPGKVPLGLFNTMFSLNGTWQSDASATKALAVDGWFISLYNMQLSKIPLRLKEEIIKAVPPCWEPAALASFIEKYGTHIIMSVKIGGKDVVYIRQYQSSPLSPGEIKRYLKEIADQRFAEGSEQFMLNMRSNEESPIPLTSTSHAHRLQMANAYTSASFTTKGDVEVIFRRRGGDCTVKHHSDWLDTVPSSPDVVEMTFIPITSLLNEVPGSGFLSHAIKLYLRYKPPIEELQFFLEFQIPRQWSPGFDLPIVPQRKEPVCPSLQFSLMGPKVYVSTNQVTVGRRPVTGLRLFLEGKKGNRLAIHLQHLSNLPKILQLHWDQHIPIGLPVWKEPEEQDSKWFEPVQWKSFSHVSTAPIEYLKESYVGETSAVYIVTGAQLRVWDFGLKNVLFLRLLFLKVPGCSVKRTVWDHSPESSQKSGLFSQLGLSTTFSSASKAKPAPVVLNSAVFPEGPPVPVQNHKFLKFVDVKEMMKGAQDMPGHWLVTGAKLDVDKGKIALRVKYSLLHY

SEQ ID NO: 1095 - protein, 385 aa, Platycerium bifurcatum
MVQNEPDRMAAQATAREAMQALGRGFDVTLDLRLAYCKGPPGSCLIELDEEEKSDILIPGGAAIIPDVSRDIKCDKGERTHFSSEVLPFEQMSERFNQALSIPGKVPLGLFNTMFSLNGTWQSDASATKALAVEGWFISLYNMQISKIPLRLKEEVKKAVPPCWEPAALASFIEKYGTHIITSVKIGGKDVVYIRQYQSSPLSPGEIKSYLKEIADQRFAEGSEQFMLNMRSNEKSPIPLTSTSHAHRLQMANAYTSASFTTKGDVEVILRRRGGDCMVKHHSDWLATVPFSPDVIAMSFIPITALLNGVPGSGFLSHAINLYLRYKPPIEELQFFLEFQIPRLWSPGFDLPLVPQRKEPVCPSLQFSLMGPKIYVSTNQVTVGR

SEQ ID NO: 1096 - protein, 358 aa, Huperzia carinata
MVWAGDQEMVQNEPDRMNAQATAREAMQALGRGFDVTLDLRLAYCKGPPGSCLIELDEEEKSDILIPGGAAIIPDVSRDIKCDKGERTHFSSEVLPFEQMSERFNQALSIPGKVPLGLFNTMFSLNGTWQSDASATKALAVDGWFISLYNMQISKIPLRLKEEVKKAVPPCWEPAALASFIEKYGTHIITSVKIGGKDVVYIRQYQSSPLSPGEIKRYLTEIADQRFAEGSEQFMLNMRSNEKSPIPLTSTSHAHRLQMANTYTSASFTTKGDVEVIFRRRGGDCTVKHHSDWLATVPSSPDVVEMTFIPITSLLNEVPGSGFLSHAIKLYLRYKPPIEELQFFLEFQIPRVWSPGFD

SEQ ID NO: 1097 - protein, 657 aa, Huperzia carriata (Philippines)
MAQTDSDRMAAQATAREALQALGRGFDVTLDLRLAYCKGPSGSRIIEFDEEANLDLVVPGGAAIIPNVSGDIRCEKGERTHFISDVLPFHQMAERFNDALNISGKVPLGFFNTVFSLNGTWQSDASTTKALAVDGWFMSLYNMQISKTPQNLKEEVKKAVPPFWEPAALARFIEKYGTHIIMSVKIGGKDVVYLRQYQSSTLSPGEIKKYLKEIADQRFAEGSGQGISNMQSKEKSSDPVTSANHAHRLQMANTHTSTSFKAKGDVEVIFRRKGGDCTVKHHSDWLATVPSSPDVMSMTFIPITSLLNEVPGSGFLSHAINLYLRYKPPIEELQLFLEFQIPRQWSPGFDLPLVPQRKEPVCPSLQFSLMGPKVYVSTNQVTVGRRPVTGLRLSLEGKKGNRLAIHLQHLSNLPKILQPHWDQHIPIGLPVWKEPEEQDSKWFEPVQWKSFSHVSTAPIEYLQESYIGETSAVYIVTGAQLRVWDFGLKNVLFLRLLFLKVPGCSVKRTVWDHSPESSQKSGLFSQLAVSKTFSSAHKAKPAPVVLKKVPGCSVKRTIWDHSPESSQKSGLFSQLAVSKTFSSAHKAKPAPVVLNSAVLPEGPHVPVQSLKFLKFVDVKEMMKGAQDMPGHWLVTGAKLDVDKGKIALRVKYSLLHY

SEQ ID NO: 1098 - protein, 618 aa, Platycerium bifurcatum
MVWAGHQQMAQKEPGKFVAEVTAREAVQAIGRGFDVTLDLRLAYCKGPAGSRLIELDEEKNVDMVIPGGGFVLQGVSRDIRCDKGERTRFRSEVLSFHHMSERFNQALCISGKMPLGLFNSMYNLNGTWQSDASATKSLALDGWFISLYNLQLRKASLTLKEEVKEAVPSVWEPAALARFIDKYGTHIIESVKVGGKDVVYTRQYQSSPLTPGDIQKYLKELADQRFAEGSGQNNVNMRAKEKSLDPFAVTNHAHRLQLASTNTSSSFTAKGDVEVNYKRRGGDNLVRFHGDWLATVPLSPDVISMSFVPITSLLNGVPGSGFLSHAINLYLRYKPPIEELRSFLEFQIPRQWCPGFDLPLGPQRKEPACPSLQFSFMGPKLYINTAQVIVGRRPVTGLQLFLEGKKGNRLAIHLQHLSNLPKILQPHWGQHIAVGPPVWKQPEELDTKWFEPVQWKSFSHVSTAPIEYGKEDDNIANIVTGAQLQVWDLGVWDLGAKKVLFLRLLFSKVPGCSIKTSFWDHTPQSSQKSGLFSQLGLSTNFTSARKAKPAAVILNSAIFPEGPPAAVQKLKLLKFVDVKEMTKGAHDTPGHWLVTGARLDADRGKIALRVKYALLLY

SEQ ID NO: 1099 - protein, 617 aa, Huperzia salvinioides
MVWAGDQEMAQTDSDRMAAQATAREALQALGRGFDVTLDLRLAYCKGPSGSRIIEFDEEANLDLVIPGGAAIIPNVSRDIRCEKGERKHFRSDVLPFHQMAERFNEALNISGKVPLGLFNTMFSFNGTWQSDASAIKALAVDCWVISLYNMQISKTLKNLKEEVKKAVPPFWEPAALARFIEKYGTHIIMSVKIGGRDVVYIKQYQSSTLSPEEIKRYLREIADQRFAEGSGQGISNMQSKEKSSDPLTSANHAHRLQMANTHTSTSFTAKGDVEVILRRRGGDCMVKHHSDWLATVPFSPDVIAMSFIPITALLNGVPGSGFLSHAIKLYLRYKPPIEELQFFLEFQIPRQWSPGFDLPLVPQRKEPVCPSLQFSLMGPKVYVSTNQVTVGRRPVTGLRLSLEGKKGNRLAIHLQHLSNLPKILQPHWDQHIPIGLPVWKEPEEQDSKWFEPVQWKSFSHVSTAPIEYLKESYVGETSAVYIVTGAQLRVWDFGLKNVLFLRLLFLKVPGCSVKRTVWDHSPESSQKSGLLSQLGLSTTFSSASKAKPAPVVLNSAVFPEGPPVPVQNLKFLKFVDVKEMSKGAQDVPGHWLVTGAKLDVDKGKIALRLKYSLLHY

SEQ ID NO: 1100 - protein, 616 aa, Huperzia phlegmaria
MVWAGDQEMVQNEPDRMAAQATAREALQALGRGFDVTLDLRLAYCKGPSGSRIIEFDEEANLDLVIPGGAAIIPNVSRDIRCEKGERKHFRSDVLPFHQMAERFNEALSISGKVPLGLFNTVFSLNGTWQSDASAIKALAVDCWVISLYNMQISRTPKNLKEEVKKAVPPFWEPAALARFIEKYGTHIIMSVKIGGKDVVYLRQYQSSTLSPGEIKKYLKEIADQRFAEGSGHDISNMQSKEKSSDPLTSTNHAHRLQMANAHTSASFTAKGDVEVIFRRRGGDCTVKHHSDWLDTVPSSPDVVEMTFIPITSLLNEVPGSGFLSHAIKLYLRYKPPIEELQFFLEFQIPRQWSPGFDLPIVPQRKEPVCPSLQFSLMGPKVYVSTNQVTVGRRPVTGLRLFLEGKKGNRLAIHLQHLSNLPKILQLHWDQHIPIGLPVWKEPEEQDSKWFEPVQWKSFSHVSTAPLEYLVESYVGEINSTYIVTGAQLRVWDFGIKNVLFLRLLFCRVPGCSIKRSFWDHTPQASQKSNLFSQLGLSSTSSARKAKPVPIVLNSAVYPDDPPTSTQTNKLLKFVDNKEMTKGAQDKPGHWLVTGAKLDVDGGKIALGVKYSLLHY

SEQ ID NO: 1101 - protein, 458 aa, Platycerium bifurcatum
MVWAGDQEMAQTEPDRMAAQAIAREALQALGRGFDVTLDLRLAYCKGPPGSCLIELDEEEKSDILIPGGAAIIPDVSRDIKCDKGERTHFSSEVLPFEQMSERFNQALCISGKMPLGLFNSMYNLGLFNTMFSLNGTWQSDASATKALAVEGWFISLYNMQISKIPLRLKEEVKKAVPPCWEPAALASFIEKYGTHIITSVKIGGKDVVYIRQYQSSPLSPGEIKSYLKEIADQRFAEGSEQFMLNMRSNEKSPIPLTSTSHAHRLQMANAYTSASFTTKGDVEVILRRRGGDCMVKHHSDWLATVPFSPDVIAMSFIPITALLNGVPGSGFLSHAINLYLRYKPPIEELQFFLEFQIPRQWSPGFDLPIVPQRKEPVCPSLQFSLMGPKIYVSTNQVTVGRRPVTGLRLFLEGKKGNRLAIHLQHLSNLPKILQPHWDQHIPIGLPVWKEPEEQDSK

SEQ ID NO: 1102 - protein, 613 aa, Huperzia nummulariifolia (Blume)
MVWAGDQEMAQTDSDRMAAQATAREALQALGRGFDVTLDLRLAYCKGPSGSRIIEFDEEANLDLVIPGGAAIIPNVSRDIRCEKGERKHFRSDVLPFHQMAERFNDALNISGKVPSGFFNSVFSLNGTWQSDASAIKALAVDCWVISLYNMQISKTPQNLKEEVKKAVPPFWEPAALARFIEKYGTHIIMSVKIGGRDVVYIKQYQSSTLSPEEIKRYLREIADQRFAEGSGQGISNMQSKEKSSDPLTSANHAHRLQMANTHTSTSFTAKGDVEVIFRRRGGDCTVKHHSDWLDTVPSSPDVVEMTFIPITSLLNGVPGSGFLSHAIKLYLRYKPPIEELQFFLEFQIPRQWSPGFDLPLVPQRKEPVCPSLQFSLMGPKVYVSTNQVTVGRRPVTGLRLSLEGKKGNRLAIHLQHLSNLPKILQPHWDQHIPIGLPVWKEPEEQDSKWFEPVQWKSFSHVSTAPIEYGKEDDLIANIVTGAQLQVWDLGAKKVLFLRLLFSKVPGCSIKTSFWDHTPQSSQKSGLFSQLGLSTNFTSARKAKPAAVILNSAIFPEGPPAAVQKLKLLKFVDVKEMTKGAQDTPGHWLVTGARLDADRGKIAIRVKYALLLY

SEQ ID NO: 1103 - protein, 449 aa, Platycerium bifurcatum
MVCAGDQEMAQTEPDRMAAQAIAREALQALGRGFDVTLDLRLAYCKGPSGSRIIEFDEKSNLDLVIPGGAAIIPNVSGDIRCEKGERTHFRSDVLPFHEMAERFNDALNISGKVPLGFFNTMFSLNGTWQSDASATKALAVDGWFMSLYNMQISKTPQNLKEEVKKAVPPFWEPAALARFIEKYGTHIIMSVKIGGKDVVYIRQYQSSTLSPGEIKKYLKEIADQRFAEGSGHDISNMQSKEKSSDPLTSTNHAHRLQMANTHTSASFTAKGDVEVIFRRRGGDCTVKHHSDWLATVPSSPDVMAMTFIPITSLLNEVPGSGFLSHAINLYLRYKPPIEELQFFLEFQIPRQWSPGFDLPIVPQRKEPVCPSLQFSLMGPKIYVSTNQVTVGRRPVTGLRLFLEGKKGNRLAIHLQHLSNLPKILQPHWDQHIPIGLPVWKEPEEQDSK

SEQ ID NO: 1104 - protein, 475 aa, Platycerium bifurcatum
MAYREAERTIAQSTAIEALQCLGRGFDVTLDLRLAYCKGPSGSLLVELSEETYPEIVLPGGVVITNVSKDIKCDKGERTHFRSEVLTFHQMSTRFNEALSITGKMPLGLFNTMFSFNGTMPLGLFNTMFSFNGTWQGDASETKALALDGWFITLYNMQITKPELSLNEEVKKAVPSSWEPAALARFIEKYGTHIIVSVKLGGKDVVYLKQYESSLLSSGEVQKYLKVIADQRFSEEAGQNISDTHLKDKLPDPLTSTNHAHRLQMASNFTSSSFTTIKDVELIVRRRGGDSLVKRHNDWLATVSSAPDVVSMSFVAISSLLNGVPGSGFLSHAVNLYLRYKPPIEELQFFLEFQIPKQWSPGFDLPLGPQRKGPVCPAMQFSLMGPKLYVCTTQVTVGRRPVTGLRLFLEGKKGNRLTIHLQHLSNLPKILQPHWDQHIAIGPPIWKEPEEHCSMEKLLSCKHCAPGVPGRIICG

SEQ ID NO: 1105 - protein, 617 aa, Huperzia phlegmaria
MVWAGDQEMVQNEPDRMAAQATAREALQALGRGFDVTLDLRLAYCKGPSGSRIIEFDEEANLDLVIPGGAAIIPNVSRDIRCEKGERKHFRSDVLPFHQMAERFNEALSISGKVPLGLFNTVFSLNGTWQSDASAIKALAVDCWVISLYNMQISRTPKNLKEEVKKAVPPFWEPAALARFIEKYGTHIIMSVKIGGKDVVYLRQYQSSTLSPGEIKKYLKEIADQRFAEGSGHDISNMQSKEKSSDPLTSTNHAHRLQMANAHTSASFTAKGDVEVIFRRRGGDCTVKHHSDWLDTVPSSPDVVEMTFIPITSLLNEVPGSGFLSHAIKLYLRYKPPIEELQFFLEFQIPRQWSPGFDLPIVPQRKEPVCPSLQFSLMGPKVYVSTNQVTVGRRPVTGLRLFLEGKKGNRLAIHLQHLSNLPKILQLHWDQHIPIGLPVWKEPEEQDSKWFEHVQWKSFSHVSTAPIEYRRESYVGETSAVYIVTGAQLRVWDFGLKNVLFLRLLFLKVPGCSVKRSVWDHTPQASQKSGLFSQFGLSTNFTSAHKAKPAPVVLNSAVFPEGPPAPAQNLKLLKFVDVKEMSKGAQDVPGHWLVTGAKLDVDKGKIALRLKYSLLHY

SEQ ID NO: 1106 - protein, 305 aa, Huperzia phlegmaria
MVWAGDQEMAQIEPDRMAAQATAREALQALGRGFDVTLDLRLAYCKGPPGSCLIELDEEEKSDILIPGGAAIIPDVSRDIKCDKGERTHFSSEVLPFEQMSERFNQALSIPGKVPLGLFNTMFSLNGTWQSDASATKALAVDGWFISLYNMQLSKIPLRLKEEIIKAVPPCWEPAALARFIFIEKYGTHIIMSVKIGGKDVVYIRQYQSSPLSPGEIKRYLKEIADQRFAEGSEQFMLNMRSNEESPIPLTSTSHAHRLQMANAYTSASFTTKGDVEVIFRRRGGDCTVNTIVIGWILFLLPLMS

SEQ ID NO: 1107 - protein, 620 aa, Huperzia nummarifolia
MVWAGHQQMAQKEPGKVVAEVTAREAVQAIGRGFDVTLDLRLAYCKGPAGSRLIELDEEKNVDMVIPGGGFVLQGVSRDIRCDKGERTRFRSEVLSFHHMSERFNQALCISGKMPLGLFNSMYNLNGTWQSDASATKSLALDGWFISLYNLQLRKASLTLKEEVKEAVPSVWEPAALARFIDKYGTHIIESVKVGGKDVVYTRQYQSSPLTPGDIQKYLKELADQRFAEGSGQNNVNMRAKEKSLDPFAVTNHAHRLQLASTNTSSSFTAKGDVEVNYKRRGGDNLVRFHGDWLATVPLSPDVISMSFVPITSLLNGVPGSGFLSHAINLYLRYKPPIEELRSFLEFQIPRQWCPGFDLPLGPQRKEPACPSLQFSFMGPKLYINTAQVIVGRRPVTGLQLFLEGKKGNRLAIHLQHLSNLPKILQPHWGQHIAVGPPVWKQPEELDTKWFEPVQWKSFSHVSTAPIEYSTAPIEYGKEDDNIANIVTGAQLQVWDLGAKKVLFLRLLFSKVPGCSIKTSFWDHTPQSSQKSGLFSQLGLSTNFTSARKAKPAAVILNSAIFPEGPPAAVQKLKLLKFVDVKEMTKGAHDTPGHWLVTGARLDADRGKIALRVKYALLLY

SEQ ID NO: 1108 - protein, 617 aa, Platycerium bifurcatum
MGIDWAGDQMAYREAERTIAQSTAIEALQCLGRGFDVTLDLRLAYCKGPSGSLLVELSEETYPEIVLPGGVVITNVSKDIKCDKGERTHFRSEVLTFHQMSTRFNEALSITGKMPLGLFNTMFSFNGTWQGDASETKALALDGWFITLYNMQITKPELSLNEEVKKAVPSSWEPAALARFIEKYGTHIIVSVKLGGKDVVYLKQYESSLLSSGEVQKYLKVIADQRFSEEAGQNISDTHLKDKLPDPLTSTNHAHRLQMANTHTSASFTAKGDVEVIFRRRGGDCTVKHHSDWLATVPSSPDVMAMTFIPITSLLNEVPGSGFLSHAINLYLRYKPPIEELQFFLEFQIPRLWSPGFDLPLVPQRKEPVCPSLQFSLMGPKIYVSTNQVTVGRRPVTGLRLFLEGKKGNRLAIHLQHLSNLPKILQPHWDQHIPIGLPVWKEPEEQDSKWFEPVQWKSFSHVSTAPIEYLKESYVGETSAVYIVTGAQLRVWDFGLKNVLFLRLLFLKVPGCSVKRTIWDHSPESSQKSGLFSQLAVSKTFSSAHKAKPAPVVLNSAVLPEGPHVPVQSLKFLKFVDVKEMMKGAQDMPGHWLVTGAKLDVDKGKIALRVKYSLLHY

SEQ ID NO: 1109 - protein, 538 aa, Huperzia goebelii (Holub)
MQISKTPKNLKEEVKKAVPPFWEPAALARFIEKYGTHIIMSVKIGGRDVVYIKQYQSSTLSPEEIKRYLREIADQRFAEGSGQGISNMQSKEKSSDLLTLSPEEIKRYLREIADQRFAEGSGQGISNMQSKEKSSDLLTSANHAHRLQMANTHTSTSFTAKGDVEVIFRRRGGDCTVKHHSDWLATVPSSPDVMSMTFIPITSLLNEVPGSGFLSHAINLYLRYKPPIEELQFFLEFQIPRQWSPGFDLPLVPQRKEPVCPSLQFSLMGPKVYVSTNQVTVGRRPVTGLRLSLEGKKGNRLAIHLQHLSNLPKILQPHWDQHIPIGLPVWKEPEEQDSKSNLPKILQPHWDQHIPIGLPVWKEPEEQDSKWFEPVQWKSFSHVSTAPIEYLKESYVGETSAVYIVTGAQLRVWDFGLKNVLFLRLLFLKVPGCSVKRTVWDHSPESSQKSGLFSQLGLSTTFSSASKAKPVPVVLNSAVFPEGPPVPVQNLKFLKFVDVKEMMKGAQDMPGHWLVTGAKLDVDKGKIALRVKYSLLHY

SEQ ID NO: 1110 - protein, 342 aa, Platycerium bifurcatum
MAAQAIAREALQALGRGFDVTLDLRLAYCKGPPGSCLIELDEEEKSDILIPGGAAIIPDVSRDIKCDKGERTHFSSEVLPFEQMSERFNQALCISGKMPLGLFNTMFSLNGTWQSDASATKALAVEGWFISLYNMQISKIPLRLKEEVKKAVPPCWEPAALASFIEKYGTHIITSVKIGGKDVVYIRQYQSSPLSPGEIKSYLKEIADQRFAEGSEQFMLNMRSNEKSPIPLTSTSHAHRLQMANAYTSASFTTKGDVEVILRRRGGDCMVKHHSDWLATVPFSPDVIAMSFIPITALLNGVPGSGFLSHAINLYLRYKPPIEELQFFLEFQIPRQWSPGFD

SEQ ID NO: 1111 - protein, 639 aa, Huperzia carriata (Philippines)
MGIDWAGDQMAYREAERTIAQSTAIEALQCLGRGFDVTLDLRLAYCKGPSGSLLVELSEETYPEIVLPGGVVITNVSKDIKCDKGERTHFRSEVLTFHQMSTRFNEALSITGKMPLGLFNTMFSFNGTWQGDASETKALALDGWFITLYNMQITKPELSLNEEVKKAVPSSWEPAALARFIEKYGTHIIVSVKLGGKDVVYLKQYESSLLSSGEVQKYLKVIADQRFSEEAGQNISDTHLNLKVIADQRFSEEAGQNISDTHLKDKLPDPLTSTNHAHRLQMASNFTSSSLTTIKDVEVIVRRRGGDSLVKRHNDWLATVSSAPDVVSMSFVAISSLLNGVPGSGFLSHAVNLYLRYKPPIEELQFFLEFQIPKQWSPGFDLPLGPQRKGPVCPAMQFSLMGPKLYVCTTQVTVGRRPVTGLRLFLEGKKGNRLTIHLQHLSNLPKILQPHWDQHIAIGPPIWKEPEEQDSKWFEPVQWKSFSHVSTAPLEYLVESYVGEINSTYIVTGAQLRVWDFGIKNVLFLRLLFCRVPGCSIKRSFWDHTPQASQKSNLFSQLGLSSISSARKAKPVPIVLNSAVFPDDPPQSTQTHKLLKFVDIKEMTKGAQDKPGHWLVTGAKLDVDGGKIALGVKYSLLHY

SEQ ID NO: 1112 - protein, 609 aa, Huperzia carriata (Philippines)
MAQTDSDRMAAQATAREALQALGRGFDVTLDLRLAYCKGPSGSRIIEFDEEANLDLVVPGGAAIIPNVSGDIRCEKGERTHFISDVLPFHQMAERFNDALNISGKVPLGFFNTVFSLNGTWQSDASTTKALAVDGWFMSLYNMQISKTPQNLKEEVKKAVPPFWEPAALARFIEKYGTHIIMSVKIGGKDVVYLRQYQSSTLSPGEIKKYLKEIADQRFAEGSGQGISNMQSKEKSSDPVTSANHAHRLQMANTHTSTSFKAKGDVEVIFRRKGGDCTVKHHSDWLATVPSSPDVMSMTFIPITSLLNEVPGSGFLSHAINLYLRYKPPIEELQLFLEFQIPRQWSPGFDLPLVPQRKEPVCPSLQFSLMGPKVYVSTNQVTVGRRPVTGLRLSLEGKKGNRLAIHLQHLSNLPKILQPHWDQHIPIGLPVWKEPEEQDSKWFEHVQWKSFSHVSTAPIEYRRESYVGETSAVYIVTGAQLRVWDFGLKNVLFLRLLFLKVPGCSVKRSVWDHTPQASQKSGLFSQFGLSTNFTSAHKAKPAPVVLNSAVFPEGPPAPAQNLKLLKFVDVKEMSKGAQDVPGHWLVTGAKLDVDKGKIALRVKYSLLHY

SEQ ID NO: 1113 - protein, 455 aa, Huperzia nummarifolia
MVWAGDQEMVQNEPDRMAAQAIAREALQALGRGFDVTLDLRLAYCKGPPGSCLIELDEEEKSDILIPGGAAIIPDVSRDIKCDKGERTHFSSEVLPFEQMSERFNQALCISGKMPLGLFNSMYNLNGTWQSDASATKALAVEGWFISLYNMQISKIPLRLKEEVKKAVPPCWEPAALASFIEKYGTHIITSVKIGGKDVVYIRQYQSSPLSPGEIKRYLKEIADQRFAEGSEQFMLNMRSNEKSPIPLTSTSHAHRLQMANAYTSASFTTKGDVEVILRRRGGDCMVKHHSDWLATVPFSPDVIAMSFIPITALLNGVPGSGFLSHAINLYLRYKPPKLFLEFQIPRQWSPGFDLPIVPQRKEPVCPSLQFSLMGPKIYVSTNQVTVGRRPVTGLRLFLEGKKGNRLAYNICLIFLKSFNHIGINIYQLDFLSGRNLKSKIANGLNLFNGKASLM

SEQ ID NO: 1114 - protein, 303 aa, Huperzia phlegmaria
MVWAGDQEMAQIEPDRMAAQATAREALQALGRGFDVTLDLRLAYCKGPSGSRIIEFDEEANLDLVIPGGVAIIPNVSGDIRCEKGERTHFISDVLSFHQMAERFNEALNISGKVPSGFFNTVFSLNGTWQSDASATKALAVDGWFISLYNMQLSKIPLRLKEEIIKAVPPCWEPAALASFIEKYGTHIIMSVKIGGKDVVYIRQYQSSPLSPGEIKRYLKEIADQRFAEGSEQFMLNMRSNEESPIPLTSTSHAHRLQMANAYTSASFTTKGDVEVIFRRRGGDCTVKHHSDWLDLFLLPLMS

SEQ ID NO: 1115 - protein, 305 aa, Huperzia phlegmaria
MVWAGDQEMAQIEPDRMAAQATAREALQALGRGFDVTLDLRLAYCKGPPGSCLIELDEEEKSDILIPGGAAIIPDVSRDIKCDKGERTHFSSEVLPFEQMSERFNQALSIPGKVPLGLFNTMFSLNGTWQSDASATKALAVDGWFISLYNMQLSKIPLRLKEEIIKAKAVPPCWEPAALASFIEKYGTHIIMSVKIGGKDVVYIRQYQSSPLSPGEIKRYLKEIADQRFAEGSEQFMLNMRSNEESPIPLTSTSHAHRLQMANAYTSASFTTKGDVEVIFRRRGGDCTVNTIVIGWILFLLPLMS

SEQ ID NO: 1116 - protein, 295 aa, Platycerium bifurcatum
MVWAGDQEMVQNEPDRMAAQAIAREALQALGRGFDVTLDLRLAYCKGPPGSCLIELDEEEKSDILIPGGAAIIPDVSRDIKCDKGERTHFSSEVLPFEQMSERFNQALCISGKMPLGLFNSMYNLNGTWQSDASATKALAVDGWFMSLYNMQISKTPQNLKEEVKKAVPPFWEPAALARFIEKYGTHIIMSVKIGGKDVVYIRQYQSSTLSPGEIKKYLKEIADQRFAEGSGHDISNMQSKEKDVEVIFRRRGGDCTVKHHSDWLATVPSSPDVMAMTFIPITSLLNEVPGSGFL

SEQ ID NO: 1117 - protein, 287 aa, Huperzia phlegmaria
MAAQATAREALQALGRGFDVTLDLRLAYCKGPSGSRIIEFDEEANLDLVIPGGAAIIPNVSGDIRCEKGERTHFISDVLSFHQMAERFNEALNISGKVPSGFFNTVFSLNGTWQSDASAIKALAVDCWVISLYNMQISRTPKNLKEEVKKAVPPFWEPAALARFIEKYGTHIIMSVKIGGKDVVYLRQYQSSTLSPGEIKKYLKEIADQRFAEGSGHDISNMQSKEKSSDPLTSTNHAHRLQMANAHTSASFTAKGDVEVIFRRRGGDCTVNTIVIGWILFLLPLMS

SEQ ID NO: 1118 - protein, 367 aa, Huperzia nummulariifolia (Blume)
MVWAGHQQMAQKEPGKLAAEVTAREAVQAIGRGFDVTLDLRLAYCKGPSGSRIIEFDEEANLDLVIPGGAAIIPNVSRDIRCEKGERKHFRSDVLPFHQVPGGAAIIPNVSRDIRCEKGERKHFRSDVLPFHQMAERFNDALNISGKVPSGFFNSVFSLNGTWQSDASAIKALAVDCWVISLYNMQISKTPQNLKEEVKKAVPPFWEPAALARFIEKYGTHIIMSVKIGGRDVVYIKQYQSSTLSPEEIKRYLREIADQRFAEGSGQGISNMQSKEKSSDPLTSANHAHRLQMANTHTSTSFTAKGDVEVIFRRRGGDCTVKHHSDWLDTVPSSPDVVEMTFIPITSLLNGVPGSGFLSHAIKLYLR

SEQ ID NO: 1119 - protein, 514 aa, Platycerium bifurcatum
MSERFNQALCISGKMPLGLFNSMYNLNGTWQSDASATKSLALDGWFISLYNLQLRKASLTLKEEVKEAVPSVWEPAALARFIDKYGTHIIESVKVGGKDVVYTRQYQSSPLTPGDIQKYLKELADQRFAEGSGQNNVNMRAKEKSLDPFAVTNHAHRLQLASTNTSSSFTAKGDVEVNYKRRGGDNLVRFHGDWLATVPLSPDVISMSFVPITSLLNGVPGSGFLSHAINLYLRYKPPIEELRSFLEFQIPRQWCPGFDLPLGPQRKEPACPSLQFSFMGPKLYINTAQVIVGRRPVTGLQLFLEGKKGNRLAIHLQHLSNLPKILQPHWGQHIAVGPPVWKQPEELDTKWFEPVQWKSFSHVSTAPIEYGKEDDNIANIVTGAQLQVWDLGAKKVLFLRLLFSKVPGCSIKTSFWDHTPQSSQKSGLFSQLGLSTNFTSARKAKPAAVILNSAIFPEGPPAAVQKLKLLKFVDVKEMTKGAHDTPGHWLVTGARLDADRGKIALRVKYALLLY

SEQ ID NO: 1120 - protein, 329 aa, Huperzia nummulariifolia
MVWAGDQEMAQTEPDRMAAQAIAREALQALGRGFDVTLDLRLAYCKGPSGSHIIEFDEEANLDLVIPGGAAIIPNVSGDIRCEKGERTHFRSDVLPFHEMAERFNDALNISGKVPLGFFNTMFSLNGTWQSDASATKALAVDGWFMSLYNMQISKTPQNLKEEVKKAVPPFWEPAALARFIEKYGTHIIMSVKIGGKDVVYIRQYQSSTLSPGEIKKYLKEIADQRFAEGSGHDISNMQSKEKDVEVIFRRRGGDCTVKHHSDWLATVPSSPDVMAMTFIPITSLLNEVPGSGFLSHAINLYLRYKPPIEELQFFLEFQIPRQWSPGFD

SEQ ID NO: 1121 - protein, 303 aa, Huperzia phlegmaria
MVWAGDQEMAQADSDRMAAQATAREALQALGRGFDVTLDLRLAYCKGPSGSRIIEFDEEANLDLVIPGGVAIIPNVSGDIRCEKGERTHFISDVLSFHQMAERFNEALNISGKVPSGFFNTVFSLNGTWQSDASAIKALAVDCWVISLYNMQISRTPKNLKEEVKKAVPPFWEPAALARFIEKYGTHIIMSVKIGGKDVVYLRQYQSSTLSPGEIKKYLKEIADQRFAEGSGHDISNMQSKEKSSDPLTSANHAHRLQMANTHTSTSFTAKGDVEVIFRRRGGDCTVKHHSDWLDLFLLPLMS

SEQ ID NO: 1122 - protein, 617 aa, Platycerium bifurcatum
MGIDWAGDQMAYREAERTIAQSTAIEALQCLGRGFDVTLDLRLAYCKGPSGSLLVELSEETYPEIVLPGGVVITNVSKDIKCDKGERTHFRSEVLTFHQMSTRFNEALSITGKMPLGLFNTMFSFNGTWQGDASETKALALDGWFITLYNMQITKPELSLNEEVKKAVPSSWEPAALARFIEKYGTHIIVSVKLGGKDVVYLKQYESSLLSSGEVQKYLKVIADQRFSEEAGQNISDTHLKDKLPDPLTSTNHAHRLQMASNFTSSSFTTIKDVELIVRRRGGDSLVKRHNDWLATVSSAPDVVSMSFVAISSLLNGVPGSGFLSHAVNLYLRYKPPIEELQFFLEFQIPKLWSPGFDLPLGPQRKGPVCPAMQFSLMGPKLYVCTTQVTVGRRPVTGLRLFLEGKKGNRLTIHLQHLSNLPKILQPHWDQHIAIGPPIWKEPEEQDSKWFEPVQWKSFSHVSTAPIEYLKESYVGETSAVYIVTGAQLRVWDFGLKNVLFLRLLFLKVPGCSVKRTIWDHSPESSQKSGLFSQLAVSKTFSSAHKAKPAPVVLNSAVLPEGPHVPVQSLKFLKFVDVKEMMKGAQDMPGHWLVTGAKLDVDKGKIALRVKYSLLHY

SEQ ID NO: 1123 - protein, 617 aa, Huperzia phlegmaria
MVWAGDQEMAQADSDRMAAQATAREALQALGRGFDVTLDLRLAYCKGPSGSRIIEFDEEANLDLVIPGGAAIIPNVSRDIRCEKGERKHFRSDVLPFHQMAERFNEALSISGKVPLGLFNTVFSLNGTWQSDASAIKALAVDCWVISLYNMQISRTPKNLKEEVKKAVPPFWEPAALARFIEKYGTHIIMSVKIGGKDVVYLRQYQSSTLSPGEIKKYLKEIADQRFAEGSGHDISNMQSKEKSSDPLTSTNHAHRLQMANAHTSASFTAKGDVEVIFRRRGGDCTVKHHSDWLDTVPSSPDVVEMTFIPITSLLNEVPGSGFLSHAIKLYLRYKPPIEELQFFLEFQIPRQWSPGFDLPIVPQRKEPVCPSLQFSLMGPKVYVSTNQVTVGRRPVTGLRLFLEGKKGNRLAIHLQHLSNLPKILQLHWDQHIPIGLPVWKEPEEQDSKWFEHVQWKSFSHVSTAPIEYRRESYVGETSAVYIVTGAQLRVWDFGLKNVLFLRLLFLKVPGCSVKRSVWDHTPQASQKSGLFSQFGLSTNFTSAHKAKPAPVVLNSAVFPEGPPAPAQNLKLLKFVDVKEMSKGAQDVPGHWLVTGAKLDVDKGKIALRLKYSLLHY

SEQ ID NO: 1124 - protein, 616 aa, Huperzia phlegmaria
MGIDWAGDQMAYREAERTIAQSTAIEALQCLGRGFDVTLDLRLAYCKGPSGSLLVELSEETYPEIVLPGGVVITNVSKDIKCDKGERTHFRSEVLTFHQMSTRFNEALSITGKMPLGLFNTMFSFNGTWQGDASETKALALDGWFITLYNMQITKPELSLNEEVKKAVPSSWEPAALARFIEKYGTHIIVSVKLGGKDVVYLKQYESSLLSSAEVQKYLKVTADQRFSEEAGLNISDTHLKDKLPDPLTSTNHAHRVPTASNFTSSSFTTIKDVEVILRRRGGDSLVKRHNDWLATVSSAPDVVSMSFVAISSLLNGVPGSGFLSHAVNLYLRYKPPIEELQFFLEFQIPKQWSPGFDLPLGPQRKGPVCPALQFSLMGPKLYVCTTQVTVGRRPVTGLRLFLEGKKGNRLTIHLQHLSNLPKILQPHWDQHIAIGPPIWKEPEEQDSKWFEPVQWKSFSHVSTAPLEYLVESYVGEINSTYIVTGAQLRVWDFGIKNVLFLRLLFCRVPGCSIKRSFWDHTPQASQKSNLFSQLGLSSTSSARKAKPVPIVLNSAVYPDDPPTSTQTNKLLKFVDNKEMTKGAQDKPGHWLVTGAKLDVDGGKIALGVKYSLLHY

SEQ ID NO: 1125 - protein, 613 aa, Huperzia phlegmaria
MVWAGHQQMAQKEPGKLAAEVTAREAVQAIGRGFDVTLDLRLAYCKGPAGSRLIELDEEKNVDMVIPGGGFILQGVSRDIRCDKGERTRFRSEVLSFHHMSERFNQALCISGKMPLGLFNSMYNLNGTWQSDASATKSLALDGWFISLYNLQLRKASLTLKEEVKEAVPSVWEPAALARFIDKYGTHIIESVKVGGKDVVYTRQYQSSPLTPGDIQKYLKELADQRFAEGSGQNNVNMRAKEKSLDPFTVTNHAHRLQLASTNTSSSFTAKGDVEVNYKRRGGDNLVRFHGDWLATVPLSPDVVSMSFVPITSLLNGVPGSGFLSHAINLYLRYKPPIEELRSFLEFQIPRQWCPGFDLPLGPQRKEPVCPSLQFSFMGPKLYINTAQVIVGRRPVTGLQLFLEGKKGNRLAIHLQHLSNLPKILQPHWGQHISVGDPVWKQPEEQDTKWFEPVQWKSFSHVSTAPIEYGKEDDLIANIVTGAQLQVWDLGAKKVLFLRLLFSKVPGCSIKTSFWDHTPQSSQKSGLFSQLGLSTNFTSARKAKPAAVILNSAIFPEGPPAAVQKLKLLKFVDVKEMTKGAQDTPGHWLVTGARLDADRGKIALRVKYALLLY

SEQ ID NO: 1126 - protein, 617 aa, Platycerium bifurcatum
MGIDWAGDQMAYREAERTIAQSTAIEALQCLGRGFDVTLDLRLAYCKGPSGSLLVELSEETYPEIVLPGGVVITNVSKDIKCDKGERTHFRSEVLTFHQMSTRFNEALSITGKVPLGLFNTMFSLNGTWQSDASATKALAVDGWFMSLYNMQISKTPQNLKEEVKKAVPPFWEPAALARFIEKYGTHIIMSVKIGGKDVVYIRQYQSSTLSPGEIKKYLKEIADQRFAEGSGHDISNMQSKEKSSDPLTSTNHAHRLQMANTHTSASFTAKGDVEVIFRRRGGDCTVKHHSDWLATVPSSPDVMAMTFIPITSLLNEVPGSGFLSHAINLYLRYKPPIEELQFFLEFQIPRLWSPGFDLPLVPQRKEPVCPSLQFSLMGPKIYVSTNQVTVGRRPVTGLRLFLEGKKGNRLAIHLQHLSNLPKILQPHWDQHIPIGLPVWKEPEEQDSKWFEPVQWKSFSHVSTAPIEYLKESYVGETSAVYIVTGAQLRVWDFGLKNVLFLRLLFLKVPGCSVKRTIWDHSPESSQKSGLFSQLAVSKTFSSAHKAKPAPVVLNSAVLPEGPHVPVQSLKFLKFVDVKEMMKGAQDMPGHWLVTGAKLDVDKGKIALRVKYSLLHY

SEQ ID NO: 1127 - protein, 588 aa, Huperzia nummarifolia
MVWAGDQEMVQNEPDRMAAQAIAREALQALGRGFDVTLDLRLAYCKGPSGSRIIEFDEKSNLDLVIPGGAAIIPNVSGDIRCEKGERKHFRSDVLPFHQMAERFNEALNISGKVPLGFFNTMFSLNGTWQSDASATKALAVDGWFMSLYNMQISKTPQNLKEEVKKAVPPFWEPAALARFIEKYGTHIIMSVKIGGKDVVYIRQYQSSTLSPGEIKKYLKEIADQRFAEGSGHDISNMQSKEKDVEVIFRRRGGDCTVKHHSDWLATVPSSPDVMAMTFIPITSLLNEVPGSGFLSHAINLYLRYKPPIEELQFFLEFQIPRQWSPGFDLPIVPQRKEPVCPSLQFSLMGPKIYVSTNQVTVGRRPVTGLRLFLEGKKGNRLAIHLQHLSSLPKILQPHWDQHIPIGLPVWKEPEEQDSKWFEPVQWKSFSHVSTAPIEYLKESYVGETSAVYIVTGAQLRVWDFGLKNVLFLRLLFLKVPGCSVKRTIWDHSPESSQKSGLFSQLAVSKTFSSAHKAKPAPVVLNSAVLPEGPHVPVQSLKFLKFVDVKEMMKGAQDMPGHWLVTGAKLDVDRGKIALRVKYSLLHY

SEQ ID NO: 1128 - protein, 403 aa, Huperzia tetratoides
MVSAGHRQMAQKEPGKLAAEVTAREAVQAIGRGFDVTLDLRLAYCKGPAGSRLIELDEEKNVDMVIPGGGFVLRGVSRDIRCDKGERTRFRSEVLSFHHMSERFNQALSISGKMPLGLFNTMYSLNGTWQSDASATKSLALDGWFISLYNLQLRKASLTLKEEVKEAVPSVWEPAALARFIDKYGTHIIESVKVGGKDVVYTRQYQSSPLTSGDIQKYLKELADQRFAEGSGTNNVNMRAKEKSPDPFTVTNHAHRLQLASTNTSSSFTAKGDVEVNFKRRGGDNLVRFHGDWLATVPLSPDVISMSFVPITSLLNGVPGSGFLSHAVNLYLRYKPPIEELRSFLEFQIPRQWSPGFDLPLGPQRKEPACPSLQFSFMGPKLYINTAQVIVGRRPVTGLQLRF

SEQ ID NO: 1129 - protein, 518 aa, Huperzia phlegmaria
MSERFNQALSIPGKVPLGLFNTMFSLNGTWQSDASATKALAVDGWFISLYNMQLSKIPLRLKEEIIKAVPPCWEPAALASFIEKYGTHIIMSVKIGGKDVVYIRQYQSSPLSPGEIKRYLKEIADQRFAEGSEQFMLNMRSNEESPIPLTSTSHAHRLQMANAYTSASFTTKGDVEVIFRRRGGDCTVKHHSDWLDTVPSSPDVVEMTFIPITSLLNEVPGSGFLSHAIKLYLRYKPPIEELQFFLEFQIPRQWSPGFDLPIVPQRKEPVCPSLQFSLMGPKVYVSTNQVTVGRRPVTGLRLFLEGKKGNRLAIHLQHLSNLPKILQLHWDQHIPIGLPVWKEPEEQDSKWFEPVQWKSFSHVSTAPIEYLKESYVGETSAVYIVTGAQLRVWDFGLKNVLFLRLLFLKVPGCSVKRTVWDHSPESSQKSGLFSQLGLSTTFSSASKAKPAPVVLNSAVFPEGPPVPVQNHKFLKFVDVKEMMKGAQDMPGHWLVTGAKLDVDKGKIALRVKYSLLHY

SEQ ID NO: 1130 - protein, 617 aa, Huperzia phlegmaria
MVWAGDQEMVQNEPDRMAAQATAREALQALGRGFDVTLDLRLAYCKGPSGSRIIEFDEEANLDLVIPGGAAIIPNVSRDIRCEKGERKHFRSDVLPFHQMAERFNEALSISGKVPLGLFNTVFSLNGTWQSDASAIKALAVDCWVISLYNMQISRTPKNLKEEVKKAVPPFWEPAALARFIEKYGTHIIMSVKIGGKDVVYLRQYQSSTLSPEEIKRYLREIADQRFAEGSGQGISNMQSKEKSSDPLTSTNHAHRLQMANAHTSASFTAKGDVEVIFRRRGGDCTVKHHSDWLDTVPSSPDVVEMTFIPITSLLNEVPGSGFLSHAIKLYLRYKPPIEELQFFLEFQIPRQWSPGFDLPIVPQRKEPVCPSLQFSLMGPKVYVSTNQVTVGRRPVTGLRLFLEGKKGNRLAIHLQHLSNLPKILQLHWDQHIPIGLPVWKEPEEQDSKWFEPVQWKSFSHVSTAPIEYLKESYVGETSAVYIVTGAQLRVWDFGLKNVLFLRLLFLKVPGCSVKRTVWDHSPESSQKSGLFSQLGLSTTFSSASKAKPAPVVLNSAVFPEGPPVPVQNHKFLKFVDVKEMMKGAQDMPGHWLVTGAKLDVDKGKIALRVKYSLLHY

SEQ ID NO: 1131 - protein, 668 aa, Platycerium bifurcatum
MVWAGDQEMAQTEPDRMAAQAIAREALQALGRGFDVTLDLRLAYCKGPSGSRIIEFDEKSNLDLVIPGGAAIIPNVSGDIRCEKGERTHFRSDVLPFHEMAERFNDALNISGKVPLGFFNTMFSLNGTWQSDASATKALAVDCWVISLYNMQIFKTPKNLKEEVKKAVPPFWEPAALARFIAATKALAVDGWFMSLYNMQISKTPQNLKEEVKKAVPPFWEPAALARFIEKYGTHIIMSVKIGGKDVVYIRQYQSSTLSPGEIKKYLKEIADQRFAEGSGGSGHDISNMQSKEKSSDPLTSTNHAHRLQMANTHTSASFTAKGDVEVIFRRRGGDCTVKHHSDWLATVPSSPDVMAMTFIPITSLLNEVPGSGFLSHAINLYLRYKPPIEELQFFLEFQIPRQWSPGFDLPIVPQRKEPVCPSLQFSLMGPKIYVSTNQVTVGRRPVTGLRLFLEGKKGNRLAIHLQHLSNLPKILQPHWDQHIPIGLPVWKEPEEQDSKWFEPVQWKSFSHVSTAPIEYLKESYVGETSAVYIVTGAQLRVWDFGLKNVLFLRLLFLKVPGCSVKRTVWDHSPESSQKSGLFSQLGLSTTFSSASKARPAPVVLNSTVFPEGPPVPVQNLKFLKFVDVKEMMKGAQDMPGHWLVTGAKLDVDKGKIALRVKYSLLHY

SEQ ID NO: 1132 - protein, 358 aa, Platycerium bifurcatum
MVCAGDQEMAQTEPDRMAAQAIAREALQALGRGFDVTLDLRLAYCKGPSGSRIIEFDEKSNLDLVIPGGAAIIPNVSGDIRCEKGERTHFRSDVLPFHEMAERFNDALNISGKVPLGFFNTMFSLNGTWQSDASATKALAVDGWFMSLYNMQISKTPQNLKEEVKKAVPPFWEPAALARFIEKYGTHIIMSVKIGGKDVVYIRQYQSSTLSPGEIKKYLKEIADQRFAEGSGHDISNMQSKEKSSDPLTSTNHAHRLQMANTHTSASFTAKGDVEVIFRRRGGDCTVKHHSDWLATVPSSPDVMAMTFIPITSLLNEVPGSGFLSHAINLYLRYKPPIEELQFFLEFQIPRQWSPGFD

SEQ ID NO: 1133 - protein, 285 aa, Platycerium bifurcatum
MAERFNDALNISGKVPLGFFNTMFSLNGTWQSDASATKALAVDGWFMSLYNMQISKTPQNLKEEVKKAVPPFWEPAALARFIEKYGTHIIMSVKIGGKDVVYIRQYQSSTLSPGEIKKYLKEIADQRFAEGSGHDISNMQSKEKSSDPLTSTNHAHRLQMANTHTSASFTAKGDVEVIFRRRGGDCTVKHHSDWLATVPSSPDVMAMTFIPITSLLNEVPGSGFLSHAINLYLRYKPPIEELQFFLEFQIPRLWSPGFDLPLVPQRKEPVCPSLQFSLMGVVSRF

SEQ ID NO: 1134 - protein, 560 aa, Huperzia tetratoides
MSERFNQALSISGKMPLGLFNTMYSLNGTWQSDASATKSLALDGWFISLYNLQLRKASLTLKEEVKEAVPSVWEPAALARFIDKYGTHIIESVKVGGKDVVYTRQYQSSPLTSGDIQKYLKELADQRFAEGSGTNNVNMRAKEKSPDPFTVTNHAHRLQLASTNTSSSFTAKGDVEVNFKRRGGDNLVRFHGDWLATVPLSPDVISMSFVPITSLLNGVPGSGFLSHAVNLYLRYKPPIEELRSFLEFQIPRQWSPGFDLPLGPQRKEPACPSLQFSFMGPKLYINTAQVIVGRRPVTGLQLFLEGKKGNRLAIHLQHLSNLPKILQPHWGQHISVGPPVWKQPEEQDTKWFEPVQWKSFSHVSLSNLPKILQPHWGQHISVGPPVWKQPEEQDTKWFEPVQWKSFSHVSTAPIEYGKEDDLIANIVTGAQLQVWELGAKKVLFLRLLFSKVPGCSIKTSFWDHTPQSSQKSGLFSQLGLSTNFTSARKAKPAAVILNSAIFPEGPPAAVQKLKLLKFVDVKEMTKGAHDTPGHWLVTGARLDADRGKIALRVKYALLLY

SEQ ID NO: 1135 - protein, 657 aa, Huperzia carriata (Philippines)
MAQTDSDRMAAQATAREALQALGRGFDVTLDLRLAYCKGPSGSRIIEFDEEANLDLVVPGGAAIIPNVSGDIRCEKGERTHFISDVLPFHQMAERFNDALNISGKVPLGFFNTVFSLNGTWQSDASTTKALAVDGWFMSLYNMQISKTPQNLKEEVKKAVPPFWEPAALARFIEKYGTHIIMSVKIGGKDVVYLRQYQSSTLSPGEIKKYLKEIADQRFAEGSGQGISNMQSKEKSSDPVTSANHAHRLQMANTHTSTSFKAKGDVEVIFRRKGGDCTVKHHSDWLATVPSSPDVMSMTFIPITSLLNEVPGSGFLSHAINLYLRYKPPIEELQLFLEFQIPRQWSPGFDLPLVPQRKEPVCPSLQFSLMGPKVYVSTNQVTVGRRPVTGLRLSLEGKKGNRLAIHLQHLSNLPKILQPHWDQHIPIGLPVWKEPEEQDSKWFEPVQWKSFSHVSTAPIEYLQESYIGETSAVYIVTGAQLRVWDFGLKNVLFLRLLFLKVPGCSVKRTVWDHSPESSQKSGLFSQLAVSKTFSSAHKAKPAPVVLKKVPGCSVKRTIWDHSPESSQKSGLFSQLAVSKTFSSAHKAKPAPVVLNSAVLPEGPHVPVQSLKFLKFVDVKEMMKGAQDMPGHWLVTGAKLDVDKGKIALRLKYSLLHY

SEQ ID NO: 1136 - protein, 552 aa, Huperzia phlegmaria
MGIDWAGDQMAYREAERTIAQSTAIEALQCLGRGFDVTLDLRLAYCKGPSGSLLVELSEETYPEIVLPGGVVITNVSKDIKCDKGERTHFRSEVLTFHQMSTRFNEALSITGKMPLGLFNTMFSFNGTWQGDASETKALALDGWFITLYNMQITKPELSLNEEVKKAVPSSWEPAALARFIEKYGTHIIVSVKLGGKDVVYLKQYESSLLSSAEVQKYLKVTADQRFSEEAGLNISDTHLKDKLPDPLTSTNHAHRVPTASNFTSSSFTTIKDVEVILRRRGGDSLVKRHNDWLATVSSAPDVVSMSFVAISSLLNGVPGSGFLSHAVNLYLRYKPPIEELQFFLEFQIPKQWSPGFDLPLGPQRKGPVCPALQFSLMGPKLYVCTTQVTVGRRPVTGLRLFLEGKKGNRLTIHLQHLSNLPKILQPHWDQHIAIGPPIWKEPEEQDSKWFEPVQWKSFSHVSTAPLEYLVESYVGEINSTYIVTGAQLRVWDFGIKNVLFLRLLFCRVPGCSIKRSFWDHTPQASQKSNLFSQLGLSSTSSAQTDLTVRIN

SEQ ID NO: 1137 - protein, 423 aa, Platycerium bifurcatum
MFSLNGTWQSDASATKALAVEGWFISLYNMQISKIPLRLKEEVKKAVPPCWEPAALASFIEKYGTHIITSVKIGGKDVVYIRQYQSSPLSPGEIKSYLKEIADQRFAEGSEQFMLNMRSNEKSPIPLTSTSHAHRLQMANAYTSASFTTKGDVEVILRRRGGDCMVKHHSDWLATVPFSPDVIAMSFIPITALLNGVPGSGFLSHAINLYLRYKPPIEELQFFLEFQIPRQWSPGFDLPIVPQRKEPVCPSLQFSLMGPKIYVSTNQVTVGRRPVTGLRLFLEGKKGNRLAIHLQHLSNLPKILQPHWDQHIPIGLPVWKEPEEQDSKWFEPVQWKSFSHLGLSTTFSSASKARPAPVVLNSTVFPEGPPVPVQNLKFLKFVDVKEMMKGAQDMPGHWLVTGAKLDVDKGKIALRLKYSLLHY

SEQ ID NO: 1138 - protein, 335 aa, Huperzia carinata
MVWAGDQEMVQNEPDRMNAQATAREAMQALGRGFDVTLDLRLAYCKGPPGSCLIELDEEEKSDILIPGGAAIIPDVSRDIKCDKGERTHFSSEVLPFEQMSERFNQALSIPGKVPLGLFNTMFSLNGTWQSDASATKALAVDGWFISLYNMQISKIPLRLKEEVKKAVPPCWEPAALASFIEKYGTHIITSVKIGGKDVVYIRQYQSSPLSPGEIKRYLTEIADQRFAEGSEQFMLNMRSNEKSPIPLTSTSHAHRLQMANTYTSASFTTKGDVEVIFRRRGGDCTVKHHSDWLATVPSSPDVVEMTFIPITSLLNEVPGSGFLSHAINLYLSSI

SEQ ID NO: 1139 - protein, 617 aa, Huperzia phlegmaria
MVWAGDQEMAQADSDRMAAQATAREALQALGRGFDVTLDLRLAYCKGPSGSRIIEFDEEANLDLVIPGGAAIIPNVSRDIRCEKGERKHFRSDVLPFHQMAERFNEALSISGKVPLGLFNTVFSLNGTWQSDASAIKALAVDCWVISLYNMQISRTPKNLKEEVKKAVPPFWEPAALARFIEKYGTHIIMSVKIGGKDVVYLRQYQSSTLSPGEIKKYLKEIADQRFAEGSGHDISNMQSKEKSSDPLTSTNHAHRLQMANAHTSASFTAKGDVEVIFRRRGGDCTVKHHSDWLDTVPSSPDVVEMTFIPITSLLNEVPGSGFLSHAIKLYLRYKPPIEELQFFLEFQIPRQWSPGFDLPIVPQRKEPVCPSLQFSLMGPKVYVSTNQVTVGRRPVTGLRLFLEGKKGNRLAIHLQHLSNLPKILQLHWDQHIPIGLPVWKEPEEQDSKWFEPVQWKSFSHVSTAPIEYLKESYVGETSAVYIVTGAQLRVWDFGLKNVLFLRLLFLKVPGCSVKRTVWDHSPESSQKSGLFSQLGLSTTFSSASKAKPAPVVLNSAVFPEGPPVPVQNHKFLKFVDVKEMMKGAQDMPGHWLVTGAKLDVDKGKIALRVKYSLLHY

SEQ ID NO: 1140 - protein, 356 aa, Huperzia carinata
MVWAGDQEMVQNEPDRMNAQATAREAMQALGRGFDVTLDLRLAYCKGPSGSHLIEFDEEANLDLVIPGGAAIIPNVSRDIRCEKGERKHFRSDVLPFHQMAERFNEALNISGKVPLGLFNTMFSFNGTWQSDASATKALAVDCWVISLYNMQISKTPKNLKEEVKKAVPPFWEPAALARFIEKYGTHIIMSVKIGGRDVVYIKQYQSSTLSPEEIKRYLREIADQRFAEGSGQGISNMQSKEKSSDPVTSANHAHRLQMANTHTSTSFKAKGDVEVIFRRKGGDCTVKHHSDWLATVPSSPDVVEMTFIPITSLLNEVPGSGFLSHAIKLYLRYKPPIEELQFFLEFQIPRVVSRF

SEQ ID NO: 1141 - protein, 609 aa, Huperzia carriata (Philippines)
MAQTDSDRMAAQATAREALQALGRGFDVTLDLRLAYCKGPPGSCLIELDEEEKSDILIPGGAAIIPDVSRDIKCDKGERTHFSSEVLPFEQMSERFNQALSIPGKVPLGLFNTMFSLNGTWQSDASTTKALAVDGWFMSLYNMQISKTPQNLKEEVKKAVPPFWEPAALARFIEKYGTHIIMSVKIGGKDVVYLRQYQSSTLSPGEIKKYLKEIADQRFAEGSGQGISNMQSKEKSSDPVTSANHAHRLQMANTYTSASFTTKGDVEVIFRRRGGDCTVKHHSDWLATVPSSPDVMSMTFIPITSLLNEVPGSGFLSHAINLYLRYKPPIEELQLFLEFQIPRQWSPGFDLPLVPQRKEPVCPSLQFSLMGPKVYVSTNQVTVGRRPVTGLRLSLEGKKGNRLAIHLQHLSNLPKILQPHWDQHIPIGLPVWKEPEEQDSKWFEPVQWKSFSHVSTAPIEYLQESYIGETSAVYIVTGAQLRVWDFGLKNVLFLRLLFLKVPGCSVKRTVWDHSPESSQKSGLFSQLAVSKTFSSAHKAKPAPVVLNSAVLPEGPHVPVQSLKFLKFVDVKEMMKGAQDMPGHWLVTGAKLDVDKGKIALRVKYSLLHY

SEQ ID NO: 1142 - protein, 627 aa, Huperzia phlegmaria
MKERIYHYSSHMGIDWAGDQMAYREAERTIAQSTAIEALQCLGRGFDVTLDLRLAYCKGPSGSLLVELSEETYPEIVLPGGVVITNVSKDIKCDKGERTHFRSEVLTFHQMSTRFNEALSITGKMPLGLFNTMFSFNGTWQGDASETKALALDGWFITLYNMQITKPELSLNEEVKKAVPSSWEPAALARFIEKYGTHIIVSVKLGGKDVVYLKQYESSLLSSAEVQKYLKVTADQRFSEEAGLNISDTHLKDKLPDPLTSTNHAHRVPTASNFTSSSFTTIKDVEVILRRRGGDSLVKRHNDWLATVSSAPDVVSMSFVAISSLLNGVPGSGFLSHAVNLYLRYKPPIEELQFFLEFQIPKQWSPGFDLPLGPQRKGPVCPALQFSLMGPKLYVCTTQVTVGRRPVTGLRLFLEGKKGNRLTIHLQHLSNLPKILQPHWDQHIAIGPPIWKEPEEQDSKWFEPVQWKSFSHVSTAPLEYLVESYVGEINSTYIVTGAQLRVWDFGIKNVLFLRLLFCRVPGCSIKRSFWDHTPQASQKSNLFSQLGLSSTSSARKAKPVPIVLNSAVYPDDPPTSTQTNKLLRFVDIKEMTKGAQDKPGHWLVTGAKLDVDGGKIALGVKYSLLHY

SEQ ID NO: 1143 - protein, 613 aa, Huperzia nummulariifolia (Blume)
MVWAGDQEMAQTDSDRMAAQATAREALQALGRGFDVTLDLRLAYCKGPSGSRIIEFDEEANLDLVIPGGAAIIPNVSRDIRCEKGERKHFRSDVLPFHQMAERFNDALNISGKVPSGFFNSVFSLNGTWQSDASAIKALAVDCWVISLYNMQISKTPQNLKEEVKKAVPPFWEPAALARFIEKYGTHIIMSVKIGGRDVVYIKQYQSSTLSPEEIKRYLREIADQRFAEGSGQGISNMQSKEKSSDPLTSANHAHRLQMANTHTSTSFTAKGDVEVILRRRGGDCMVKHHSDWLATVPFSPDVIAMSFIPITALLNGVPGSGFLSHAIKLYLRYKPPIEELQFFLEFQIPRQWSPGFDLPLVPQRKEPVCPSLQFSLMGPKVYVSTNQVTVGRRPVTGLRLSLEGKKGNRLAIHLQHLSNLPKILQPHWDQHIPIGLPVWKEPEEQDSKWFEPVQWKSFSHVSTAPIEYGKEDDLIANIVTGAQLQVWDLGAKKVLFLRLLFSKVPGCSIKTSFWDHTPQSSQKSGLFSQLGLSTNFTSARKAKPAAVILNSAIFPEGPPAAVQKLKLLKFVDVKEMSKGAQDVPGHWLVTGAKLDVDKGKIALRVKYSLLHY

SEQ ID NO: 1144 - protein, 615 aa, Huperzia salvinioides
MVWAGDQEMAQTDSDRMAAQATAREALQALGRGFDVTLDLRLAYCKGPPGSCLIELDEEEKSDILIPGGAAIIPDVSRDIKCDKGERTHFSSEVLPFEQMSERFNQALSIPGKVPLGLFNTMFSLNGTWLSDASATKALAVDGWFISLYNMQISKIPLHLKEEVQKAVPPCWEPAALASFIEKYGTHIIMSVKIGGKDVVYIRQYQSSPLSPGEIKRYLKEIAGQRFAEGSEQVMLNMRSNEESPIPLTSHAHRLQMANAYTSASFTTKGDVEVILRRRGGDCMVKHHSDWLATVPFSPDVIAMSFIPITALLNGVPGSGFLSHAIKLYLRYKPPIEELQFFLEFQIPRQWSPGFDLPLVPQRKEPVCPSLQFSLMGPKVYVSTNQVTVGRRPVTGLRLSLEGKKGNRLAIHLQHLSNLPKILQPHWDQHIPIGLPVWKEPEEQDSKWFEPVQWKSFSHVSTAPIEYLKESYVGETSAVYIVTGAQLRVWDFGLKNVLFLRLLFLKVPGCSVKRTVWDHSPESSQKSGLLSQLGLSTTFSSASKAKPAPVVLNSAVFPEGPPVPVQNLKFLKFVDVKEMSKGAQDVPGHWLVTGAKLDVDKGKIALRLKYSLLHY

SEQ ID NO: 1145 - protein, 615 aa, Huperzia nummulariifolia (Blume)
MVWAGDQEMAQTDSDRMAAQATAREALQALGRGFDVTLDLRLAYCKGPPGSCLIELDEEEKSDILIPGGAAIIPDVSRDIKCDKGERTHFSSEVLPFEQMSERFNQALSIPGKVPLGLFNTMFSLNGTWLSDASATKALAVDGWFISLYNMQISKIPLHLKEEVQKAVPPCWEPAALASFIEKYGTHIIMSVKIGGKDVVYIRQYQSSPLSPGEIKRYLKEIAGQRFAEGSEQVMLNMRSNEESPIPLTSHAHRLQMANAYTSASFTTKGDVEVILRRRGGDCMVKHHSDWLATVPFSPDVIAMSFIPITALLNGVPGSGFLSHAIKLYLRYKPPIEELQFFLEFQIPRQWSPGFDLPLVPQRKEPVCPSLQFSLMGPKVYVSTNQVTVGRRPVTGLRLSLEGKKGNRLAIHLQHLSNLPKILQPHWDQHIPIGLPVWKEPEEQDSKWFEPVQWKSFSHVSTAPIEYLKESYVGETSAVYIVTGAQLRVWDFGLKNVLFLRLLFLKVPGCSVKRTVWDHSPESSQKSGLLSQLGLSTTFSSASKAKPAPVVLNSAVFPEGPPVPVQNLKFLKFVDVKEMMKGAQDMPGHWLVTGAKLDVDKGKIALRLKYSLLHY

SEQ ID NO: 1146 - protein, 627 aa, Huperzia phlegmoides
MVWAGDQEMAQTDSDRMAAQATAREALQALGRGFDVTLDLRLAYCKGPSGSHIIEFDEEANLDLVIPGGAAIIPNVSRDIRCEKGERKHFRSDVLPFHQMAERFNEALNIYGKVPLGLFNTMFSFNGTWQSDASATKALAVDCWVISLYNMQISKTPKNLKEEVKKAVPPFWEPAALARFIEKYGTHIIMSVKIGGKDVVYLRQYQSSTLSPEEIKRYLREIAASTLSPEEIKRYLREIADQRFAEGSGQGISNMQSKEKSSDPLTSTNHAHRLQMANTHTSASFTAKGDVEVIFRRRGGDCTVKHHSDWLATVPSSPDVVAMTFIPITSLLNEVPGSGLLSHAINLYLRYKPFLEFQIPRQWSPGFDLPIVPQRKEPVCPSLQFSLMGPKVYVSTNQVTVGRRPVTGLRLFLEGKKGNRLAIHLQHLSNLPKILQPHWDQHIPIGLPVWKEPEEQDSKWFEPVQWKSFSHVSTAPIEYLKESYVGETSAVYIVTGAQLRVWDFGLKNVLFLRLLFLKVPGCSVKRTVWDHSPESSQKSGVFSQLGLSTTFSSASKAKPAPVVLNSAVFPEGPPVPVQNLKFLKFVDVKEMMKGAQDMPGHWLVTGAKLDVDKGKIALRVKYSLLHY

SEQ ID NO: 1147 - protein, 614 aa, Huperzia tetratoides
MVWAGDQEMVQKEPDRMVAQATAREALQALGRGFDVTLDLRLAYCKGPSGSHIIEFDEEVNLDLVIPGGATIIPNVSRDIKCEKGESTHFRSDVLPFHQMSERFNEALNISGEVPLGLFNTMFSLNGTWQSDASTTKALAIDGWFVSLYNMQISKTPQNLKEEVKKAVPPFWEPAALARFIEKYGTHIIMSVKIGGKDVVYIRQYQSSTLTPGEIKKYLKDIADQRFAEGSGQGISNMQSKEKSPDPLASTNHAHPLQMANTYTSASFTTKGDVEVIFRRRGGDCMVKHHSDWLATVPSSPDVIAMTFIPITSLLNEVPGSGFLSHAISLYLQYKPPIEELQFFLEFQISRQWSPGFDLPLVPQRKEPVCPSLQFSLMGPKLYVSTAQVTVGRRPVTGLRLCLEGKKGNRLAIHLQHLSNLPKILQPHWDQHIPIGLPVWKEPEEQDSKWFEPVQWKSFSHVSTAPIEYREESYVGETSAVYIVTGAQLRVWDFGLKNVLFLRLLFLKVPGCSVKRTVWDHSPESSQKSSLFPQLGLSTTFSSACKAKPAPVESNSTVFTEGDVKSLKFLKFVDIKEMTKGAQDMPGHWLVTGAKLDVDKGKIALRVKYSLLHY

SEQ ID NO: 1148 - protein, 403 aa, Huperzia nummulariifolia
MVWAGHQQMAQKEPGKFVAEVTAREAVQAIGRGFDVTLDLRLAYCKGPAGSRLIELDEEKNVDMVIPGGGFVLQGVSRDIRCDKGERTRFRSEVLSFHHMSERFNQALCISGKMPLGLFNSMYNLNGTWQSDASATKSLALDGWFISLYNLQLRKASLTLKEEVKEAVPSVWEPAALARFIDKYGTHIIESVKVGGKDVVYTRQYQSSPLTPGDIQKYLKELADQRFAEGSGQNNVNMRAKEKSLDPFAVTNHAHRLQLASTNTSSSFTAKGDVEVNYKRRGGDNLVRFHGDWLATVPLSPDVISMSFVPITSLLNGVPGSGFLSHAINLYLRYKPPIEELRSFLEFQIPRQWCPGFDLPLGPQRKEPACPSLQFSFMGPKLYINTAQVQFHFKLVKLSLSKI

SEQ ID NO: 1149 - protein, 613 aa, Huperzia squarrosa
MVWAGHRQMAQKEPGKLAAEVTAREAVQAIGRGFDVTLDLRLAYCKGPAGSRLIELDEEKNVDMVIPGGGFVLQGVSRDIRCDKGERTRFRSEVLSFHHMSERFNQALSISGKMPLGLFNTMYSLNGTWQSDASATKSLALDGWFISLYNLQLRKASLTLKEEVKEAVPSVWEPAALARFIDKYGTHIIESVKVGGKDVVYTRQYQSSPLTPGDIQKYLKELADQRFAEGSGQNNVNMRAKEKSPDPFTVTNHAHRLQLASTNTSSSFTAKGDVEVNFKRRGGDNLVRFHGDWLATVPLSPDVISMSFVPITSLLNGVPGSGFLSHAVNLYLRYKPPIEELRSFLEFQIPRQWSPGFDLPLGPQRKEPACPSLQFSFMGPKLYINTAQVIVGRRPVTGLQLFLEGKKGNRLAIHLQHLSNLPKILQPHWGQHISVGPPVWKQPEEQDTKWFEPVQWKSFSHVSTAPIEYGKEDDLIANIVTGAQFQVWDLGAKKVLFLRLLFSKVPGCSIKTSFWDHTPQSSQKSGLFSQLGLSTNFTSARKAKPAAVILNSAIFPEGPPSTVQKLKLLKFVDVKEMTKGAHDTPGHWLVTGARLDADRGKIALRVKYALLLY

SEQ ID NO: 1150 - protein, 356 aa, Huperzia carinata
MVWARDQEMAQTDSDRMAAQATAREALQALGRGFDVTLDLRLAYCKGPSGSHLIEFDEEANLDLVIPGGAAIIPNVSRDIRCEKGERKHFRSDVLPFHQMAERFNEALNISGKVPLGLFNTMFSFNGTWQSDASATKALAVDCWVISLYNMQISKTPKNLKEEVKKAVPPFWEPAALARFIEKYGTHIIMSVKIGGRDVVYIKQYQSSTLSPEEIKRYLREIADQRFAEGSGQGISNMQSKEKSSDPLTSTNHAHRLQMANTHTSASFTAKGDVEVIFRRRGGDCTVKHHSDWLATVPSSPDVVEMTFIPITSLLNEVPGSGFLSHAIKLYLRYKPPIEELQFFLEFQIPRVVSRF

SEQ ID NO: 1151 - protein, 482 aa, Huperzia carriata (Philippines)
MGIDWAGDQMAYREAERTIAQSTAIEALQCLGRGFDVTLDLRLAYCKGPSGSLLVELSEETYPEIVLPGGVVITNVSKDIKCDKGERTHFRSEVLTFHQMSTRFNEALSITGKMPLGLFNTMFSFNGTWQGDASETKALALDGWFITLYNMQITKPELSLNEEVKKAVPSSWEPAALARFIEKYGTHIIVSVKLGGKDVVYLKQYESSLLSSGEVQKYLKVIADQRFSEEAGQNISDTHLKDKLPDPLTSTNHAHRLQMASNFTSSSLTTIKDVEVIVRRRGGDSLVKRHNDWLATVSSAPDVVSMSFVAISSLLNGVPGSGFLSHAVNLYLRYKPPIEELQFFLEFQIPKQWSPGFDLPLGPQRKGPVCPAMQFSLMGPKLYVCTTQVTVGRRPVTGLRLFLEGKKGNRLTIHLQHLSNLPKILQPHWDQHIAIGPPIWKEPEEQDSKWFEPVQWKSFSHGARMLNKEILLGSHSTGFTEV

SEQ ID NO: 1152 - protein, 403 aa, Platycerium bifurcatum
MVWAGHQQMAQKEPGKFVAEVTAREAVQAIGRGFDVTLDLRLAYCKGPAGSRLIELDEEKNVDMVIPGGGFVLQGVSRDIRCDKGERTRFRSEVLSFHHMSERFNQALSIPGKVPLGLFNTMFSLNGTWQSDASATKSLALDGWFISLYNLQLRKASLTLKEEVKEAVPSVWEPAALARFIDKYGTHIIESVKVGGKDVVYTRQYQSSPLTPGDIQKYLKELADQRFAEGSGQNNVNMRAKEKSLDPFAVTNHAHRLQLASTNTSSSFTAKGDVEVNYKRRGGDNLVRFHGDWLATVPLSPDVISMSFVPITSLLNGVPGSGFLSHAINLYLRYKPPIEELRSFLEFQIPRQWCPGFDLPLGPQRKEPACPSLQFSFMGPKLYINTAQVQFHFKLVKLSLSKI

SEQ ID NO: 1153 - protein, 628 aa, Huperzia phlegmaria
MKERIYHYSSHMGIDWAGDQMAYREAERTIAQSTAIEALQCLGRGFDVTLDLRLAYCKGPSGSLLVELSEETYPEIVLPGGVVITNVSKDIKCDKGERTHFRSEVLTFHQMSTRFNEALSITGKMPLGLFNTMFSFNGTWQGDASETKALALDGWFITLYNMQITKPELSLNEEVKKAVPSSWEPAALARFIEKYGTHIIVSVKLGGKDVVYLKQYESSLLSSAEVQKYLKVTADQRFSEEAGLNISDTHLKDKLPDPLTSTNHAHRVPTASNFTSSSFTTIKDVEVILRRRGGDSLVKRHNDWLATVSSAPDVVSMSFVAISSLLNGVPGSGFLSHAVNLYLRYKPPIEELQFFLEFQIPKQWSPGFDLPLGPQRKGPVCPALQFSLMGPKLYVCTTQVTVGRRPVTGLRLFLEGKKGNRLTIHLQHLSNLPKILQPHWDQHIAIGPPIWKEPEEQDSKWFEPVQWKSFSHVSTAPIEYLKESYVGETSAVYIVTGAQLRVWDFGLKNVLFLRLLFLKVPGCSVKRTVWDHSPESSQKSGLFSQLGLSTTFSSASKAKPAPVVLNSAVFPEGPPVPVQNHKFLKFVDVKEMMKGAQDMPGHWLVTGAKLDVDKGKIALRVKYSLLHY

SEQ ID NO: 1154 - protein, 570 aa, Huperzia nummulariifolia (Blume)
MRERGIIEFDEEANLDLVIPGGAAIIPNVSRDIRCEKGERKHFRSDVLPFHQMAERFNDALNISGKVPSGFFNSVFSLNGTWQSDASAIKALAVDCWVISLYNMQISKTPQNLKEEVKKAVPPFWEPAALARFIEKYGTHIIMSVKIGGRDVVYIKQYQSSTLSPEEIKRYLREIADQRFAEGSGQGISNMQSKEKSSDPLTSANHAHRLQMANTHTSTSFTAKGDVEVIFRRRGGDCTVKHHSDWLDTVPSSPDVVEMTFIPITSLLNGVPGSGFLSHAIKLYLRYKPPIEELQFFLEFQIPRQWSPGFDLPLVPQRKEPVCPSLQFSLMGPKVYVSTNQVTVGRRPVTGLRLSLEGKKGNRLAIHLQHLSNLPKILQPHWDQHIPIGLPVWKEPEEQDSKWFEHVQWKSFSHVSTAPIEYRRESYVGETSAVYIVTGAQLRVWDFGLKNVLFLRLLFLKVPGCSVKRSVWDHTPQASQKSGLFSQFGLSTNFTSAHKAKPAPVVLNSAVFPEGPPAPAQNLKLLKFVDVKEMSKGAQDVPGHWLVTGAKLDVDKGKIALRLKYSLLHY

SEQ ID NO: 1155 - protein, 588 aa, Huperzia nummarifolia
MVWAGDQEMAQTEPDRMAAQAIAREALQALGRGFDVTLDLRLAYCKGPSGSRIIEFDEKSNLDLVIPGGAAIIPNVSGDIRCEKGERKHFRSDVLPFHQMAERFNEALNISGKVPLGFFNTMFSLNGTWQSDASATKALAVDGWFMSLYNMQISKTPQNLKEEVKKAVPPFWEPAALARFIEKYGTHIIMSVKIGGKDVVYIRQYQSSTLSPGEIKKYLKEIADQRFAEGSGHDISNMQSKEKDVEVIFRRRGGDCTVKHHSDWLATVPSSPDVMAMTFIPITSLLNEVPGSGFLSHAINLYLRYKPPIEELQFFLEFQIPRQWSPGFDLPIVPQRKEPVCPSLQFSLMGPKIYVSTNQVTVGRRPVTGLRLFLEGKKGNRLAIHLQHLSSLPKILQPHWDQHIPIGLPVWKEPEEQDSKWFEPVQWKSFSHVSTAPIEYLKESYVGETSAVYIVTGAQLRVWDFGLKNVLFLRLLFLKVPGCSVKRTIWDHSPESSQKSGLFSQLAVSKTFSSAHKAKPAPVVLNSAVLPEGPHVPVQSLKFLKFVDVKEMMKGAQDMPGHWLVTGAKLDVDRGKIALRVKYSLLHY

SEQ ID NO: 1156 - protein, 617 aa, Platycerium bifurcatum
MVWAGDQEMVQNEPDRMAAQATAREAMQALGRGFDVTLDLRLAYCKGPPGSCLIELDEEEKSDILIPGGAAIIPDVSRDIKCDKGERTHFSSEVLPFEQMSERFNQALSIPGKVPLGLFNTMFSLNGTWQSDASATKALAVEGWFISLYNMQISKIPLRLKEEVKKAVPPCWEPAALASFIEKYGTHIITSVKIGGKDVVYIRQYQSSPLSPGEIKSYLKEIADQRFAEGSEQFMLNMRSNEKSPIPLTSTSHAHRLQMANAYTSASFTTKGDVEVILRRRGGDCMVKHHSDWLATVPFSPDVIAMSFIPITALLNGVPGSGFLSHAINLYLRYKPPIEELQFFLEFQIPRLWSPGFDLPLVPQRKEPVCPSLQFSLMGPKIYVSTNQVTVGRRPVTGLRLFLEGKKGNRLAIHLQHLSNLPKILQPHWDQHIPIGLPVWKEPEEQDSKWFEPVQWKSFSHVSTAPIEYLKESYVGETSAVYIVTGAQLRVWDFGLKNVLFLRLLFLKVPGCSVKRTIWDHSPESSQKSGLFSQLAVSKTFSSAHKAKPAPVVLNSAVLPEGPHVPVQSLKFLKFVDVKEMMKGAQDMPGHWLVTGAKLDVDKGKIALRVKYSLLHY

SEQ ID NO: 1157 - protein, 379 aa, Huperzia squarrosa
MTQTEPDRMVAQATAREALQALGRGFDVTLDHRLAYCKGSSGSHIIEFDEEVNLDLVIPGGAAIIPNVSRDIKCEKGERQHFRSNVLSFHQMSERFNEAINISGEVPSGLFNTMFSLNGTWQSDASATKALAVDGWFISLYTMQISKTPQNLKEEVKKAVPAFWEPAALARFIEKYGTHIITSVRIGGKDAVYIRQYQSSTLSPGEIKKYLKEIADQRFAEGSGQRISNMQSKEKSPDPLTSTNHAHRLQMANAYTSASFTTKGDVEVIFRRRGGDCMVKHHSDWLATVPSSPDVLAMTFIPITSLLNEVPGSGFLSHAINLYLRYKPPIEELRLFLEFQIPRQWSPGFDLFLDSGLQVSTCHLAVREKNLYILHCNSA

SEQ ID NO: 1158 - protein, 616 aa, Huperzia nummulariifolia (Blume)
MGIDWAGDQMAYREAERTIAQSTAIEALQCLGRGFDVTLDLRLAYCKGPSGSLLVELSEETYPEIVLPGGAVITNVSKDIKCDKGERTHFRSEVLTFHQMSTRFNEALSITGKMPLGLFNTMFSFNGTWQGDASETKALALDGWFITLYNMQITKPELSLNEEVKKAVPSSWEPAALARFIEKYGTHIIVSVKLGGKDVVYLKQYESSLLSSGEVQKYLKVTADQRFSEEAGQNIADTHLKDKLPDPLTSANHAHRLQTVGNITSSSFTTIKDVEVILRRRGGDSLVKRHNDWLATVSSAPDVVSMSFVAISSLLNGVPGSGFLSHAVNLYLRYKPPIEELQFFLEFQIPKQWSPGFDLPLGPQRKGPVCPALQFSLMGPKLYVCTTQVTVGRRPVTGLRLFLEGKKANRLTIHLQHLSNLPKILQPHWDQHIAIGPPIWKEPEEQDSKWFEPVQWKSFSHVSTAPLEYLVESYVGEINSTYIVTGAQLRVWDFGIKNVLFLRLLFCRVPGCSIKRSFWDHTPQTSQKSNLFSQLGLSSISSARKAKPVPIVLNSAVYPDDPPTSTQTNKLLKFVDIKEMTKGAQDKPGHWLVTGAKLDVDGGKIALGVKYSLLHY

SEQ ID NO: 1159 - protein, 617 aa, Huperzia nummulariifolia
MVWAGDQEMVQNEPDRMAAQAIAREALQALGRGFDVTLDLRLAYCKGPPGSCLIELDEEEKSDILIPGGAAIIPDVSRDIKCDKGERTHFSSEVLPFEQMSERFNQALCISGKMPLGLFNSMYNLNGTWQSDASATKALAVDCWVISLYNMQIFKTPKNLKEEVKKAVPPFWEPAALARFIEKYGTHIIMSVKIGGKDVVYIRQYQSSTLSPGEIKKYLKEIADQRFAEGSGHDISNMQSKEKSSDPLTSTNHAHRLQMANTHTSASFTAKGDVEVIFRRRGGDCTVKHHSDWLATVPSSPDVMAMTFIPITSLLNEVPGSGFLSHAINLYLRYKPPIEELQFFLEFQIPRQWSPGFDLPLVPQRKEPVCPSLQFSLMGPKIYVSTNQVTVGRRPVTGLRLFLEGKKGNRLAIHLQHLSNLPKILQPHWDQHIPIGLPVWKEPEEQDSKWFEPVQWKSFSHVSTAPIEYLKESYVGETSAVYIVTGAQLRVWDFGLKNVLFLRLLFLKVPGCSVKRTIWDHSPESSQKSGLFSQLAVSKTFSSAHKAKPAPVVLNSAVLPEGPHVPVQSLKFLKFVDVKEMMKGAQDMPGHWLVTGAKLDVDKGKIALRLKYSLLHY

SEQ ID NO: 1160 - protein, 617 aa, Huperzia salvinioides
MVWAGDQEMAQTDSDRMAAQATAREALQALGRGFDVTLDLRLAYCKGPSGSRIIEFDEEANLDLVIPGGAAIIPNVSRDIRCEKGERKHFRSDVLPFHQMAERFNEALNISGKVPLGLFNTMFSFNGTWQSDASAIKALAVDCWVISLYNMQISKTLKNLKEEVKKAVPPFWEPAALARFIEKYGTHIIMSVKIGGRDVVYIKQYQSSTLSPEEIKRYLREIADQRFAEGSGQGISNMQSKEKSSDPLTSANHAHRLQMANTHTSTSFTAKGDVEVILRRRGGDCMVKHHSDWLATVPFSPDVIAMSFIPITALLNGVPGSGFLSHAIKLYLRYKPPIEELQFFLEFQIPRQWSPGFDLPLVPQRKEPVCPSLQFSLMGPKVYVSTNQVTVGRRPVTGLRLSLEGKKGNRLAIHLQHLSNLPKILQPHWDQHIPIGLPVWKEPEEQDSKWFEHVQWKSFSHVSTAPIEYRRESYVGETSAVYIVTGAQLRVWDFGLKNVLFLRLLFLKVPGCSVKRSVWDHTPQASQKSGLFSQFGLSTNFTSAHKAKPAPVVLNSAVFPEGPPAPAQNLKLLKFVDVKEMSKGAQDVPGHWLVTGAKLDVDKGKIALRLKYSLLHY

SEQ ID NO: 1161 - protein, 617 aa, Huperzia carriata (Philippines)
MVWAGDQEMVQNEPDRMNAQATAREAMQALGRGFDVTLDLRLAYCKGPPGSCLIELDEEEKSDILIPGGAAIIPDVSRDIKCDKGERTHFSSEVLPFEQMSERFNQALSIPGKVPLGLFNTMFSLNGTWQSDASTTKALAVDGWFISLYNMQISKIPLRLKEEVKKAVPPCWEPAALASFIEKYGTHIITSVKIGGKDVVYIRQYQSSPLSPGEIKRYLTEIADQRFAEGSEQFMSNMRSNEKSPIPLTSTSHAHRLQMANTYTSASFTTKGDVEVIFRRRGGDCTVKHHSDWLATVPSSPDVMSMTFIPITSLLNEVPGSGFLSHAINLYLRYKPPIEELQLFLEFQIPRQWSPGFDLPLVPQRKEPVCPSLQFSLMGPKVYVSTNQVTVGRRPVTGLRLSLEGKKGNRLAIHLQHLSNLPKILQPHWDQHIPIGLPVWKEPEEQDSKWFEHVQWKSFSHVSTAPIEYRRESYVGETSAVYIVTGAQLRVWDFGLKNVLFLRLLFLKVPGCSVKRSVWDHTPQASQKSGLFSQFGLSTNFTSAHKAKPAPVVLNSAVFPEGPPAPAQNLKLLKFVDVKEMSKGAQDVPGHWLVTGAKLDVDKGKIALRLKYSLLHY

SEQ ID NO: 1162 - protein, 614 aa, Huperzia nummulariifolia (Blume)
MVWAGDQEMAQTDSDRMAAQATAREALQALGRGFDVTLDLRLAYCKGPPGSCLIELDEEEKSDILIPGGAAIIPDVSRDIKCDKGERTHFSSEVLPFEQMSERFNQALSIPGKVPLGLFNTMFSLNGTWLSDASATKALAVDGWFISLYNMQISKIPLHLKEEVQKAVPPCWEPAALASFIEKYGTHIIMSVKIGGKDVVYIRQYQSSPLSPGEIKRYLKEIAGQRFAEGSEQVMLNMRSNEESPIPLTSHAHRLQMANAYTSASFTTKGDVEVILRRRGGDCMVKHHSDWLATVPFSPDVIAMSFIPITALLNGVPGSGFLSHAIKLYLRYKPPIEELQFFLEFQIPRQWSPGFDLPLVPQRKEPVCPSLQFSLMGPKVYVSTNQVTVGRRPVTGLRLSLEGKKGNRLAIHLQHLSNLPKILQPHWDQHIPIGLPVWKEPEEQDSKWFEPVQWKSFSHVSTAPLEYLVESYVGEINSTYIVTGAQLRVWDFGIKNVLFLRLLFCRVPGCSIKRSFWDHTPQTSQKSNLFSQLGLSSISSARKAKPVPIVLNSAVYPDDPPTSTQTNKLLKFVDIKEMTKGAQDKPGHWLVTGAKLDVDGGKIALGVKYSLLHY

SEQ ID NO: 1163 - protein, 382 aa, Huperzia squarrosa
MTQTEPDRMVAQATAREALQALGRGFDVTLDHRLAYCKGSSGSHIIEFDEEVNLDLVIPGGAAIIPNVSRDIKCEKGERQHFRSNVLSFHQMSERFNEAINISGEVPSGLFNTMFSLNGTWQSDASATKALAVDGWFISLYTMQISKTPQNLKEEVKKAVPAFWEPAALARFIEKYGTHIITSVRIGGKDAVYIRQYQSSTLSPGEIKKYLKEIADQRFAEGSGQRISNMQSKEKSPDPLTSTNHAHRLQMANAYTSASFTTKGDVEVIFRRRGGDCMVKHHSDWLATVPSSPDVLAMTFIPITSLLNEVPGSGFLSHAINLYLRYKPPIEELRLFLRTAVLLGISDSQAVVSRFRLAIWLSEKRTCISFIAIQLDGTKSLC

SEQ ID NO: 1164 - protein, 617 aa, Huperzia squarrosa
MVWAGHRQMAQKEPGKLAAEVTAREAVQAIGRGFDVTLDLRLAYCKGPPGSCLIELDEEEKSDILIPGGAAIIPDVSRDIKCDNGERTHFSSEVLPFEQMSERFNQALSISGKMPLGLFNTMYSLNGTWQSDASATKALAVDGWFISLYNMQISKTPQSLKEEVIKAVPPFWEPAALASFIEKYGTHIIMSVKIGGKDVVYIRQYQSSPLSPGEIKRYLKEIADQRFAEGSEQFMSNVRSNEKSPIPLTSTSHAHRLQMANAYTSASFTTKGDVEVILRRRGGDCMVKHHSDWLATVPFSPDVIAMSFIPITALLNGVPGSGFLSHAINLYLRYKPPIEELRLFLEFQIPRQWSPGFDLPFGCQRKEPVYPSLQFSLMGPKLYVSTAQVTVGRRPVTGLRLCLEGKKGNRLAIHLQHLSNLPKILQPHWDQHLPIGLPVWKEPEEQDSKWFEPVQWKSFSHVSTAPIEYRRESYVGETSAVYIVTGAQLRVWDFGLKNVLFLRLLFLKVPGCSVKRSIWDHAPQASQKSGLFSQFGLSTNFTSAHKAKPAPVVLNSAVFPEGPPAPAQNLKLLKFVDVKEMTKGAHDTPGHWLVTGARLDADRGKIALRVKYALLLY

SEQ ID NO: 1165 - protein, 613 aa, Huperzia nummarifolia
MVWAGHQQMAQKEPGKVVAEVTAREAVQAIGRGFDVTLDLRLAYCKGPAGSRLIELDEEKNVDMVIPGGGFVLQGVSRDIRCDKGERTRFRSEVLSFHHMSERFNQALCISGKMPLGLFNSMYNLNGTWQSDASATKSLALDGWFISLYNLQLRKASLTLKEEVKEAVPSVWEPAALARFIDKYGTHIIESVKVGGKDVVYTRQYQSSPLTPGDIQKYLKELADQRFAEGSGQNNVNMRAKEKSLDPFAVTNHAHRLQLASTNTSSSFTAKGDVEVNYKRRGGDNLVRFHGDWLATVPLSPDVISMSFVPITSLLNGVPGSGFLSHAINLYLRYKPPIEELRSFLEFQIPRQWCPGFDLPLGPQRKEPACPSLQFSFMGPKLYINTAQVIVGRRPVTGLQLFLEGKKGNRLAIHLQHLSNLPKILQPHWGQHIAVGPPVWKQPEELDTKWFEPVQWKSFSHVSTAPIEYGKEDDNIANIVTGAQLQVWDLGAKKVLFLRLLFSKVPGCSIKTSFWDHTPQSSQKSGLFSQLGLSTNFTSARKAKPAAVILNSAIFPEGPPAAVQKLKLLKFVDVKEMTKGAHDTPGHWLVTGARLDADRGKIALRVKYALLLY

SEQ ID NO: 1166 - protein, 420 aa, Platycerium bifurcatum
MVWAGDQEMAQTEPDRMAAQAIAREALQALGRGFDVTLDLRLAYCKGPSGSRIIEFDEKSNLDLVIPGGAAIIPNVSGDIRCEKGERTHFRSDVLPFHEMAERFNDALNISGKVPLGFFNTMFSLNGTWQSDASATKALAVDGWFMSLYNMQISKTPQNLKEEVKKAVPPFWEPAALARFIEKYGTHIIMSVKIGGKDVVYIRQYQSSTLSPGEIKKYLKEIADQRFAEGSGHDISNMQSKEKDVEVIFRRRGGDCTVKHHSDWLATVPSSPDVMAMTFIPITSLLNEVPGSGFLSHAINLYLRYKPPIEELQFFLEFQIPRQWSPGFDLPIVPQRKEPVCPSLQFSLMGPKIYVSTNQVTVGRRPVTGLRLFLEGKKGNRLAIHLQHLSNLPKILQPHWDQHIPIGLPVWKEPEEQDSK

SEQ ID NO: 1167 - protein, 651 aa, Huperzia nummarifolia
MVWAGDQEMVQNEPDRMAAQAIAREALQALGRGFDVTLDLRLAYCKGPSGSRIIEFDEKSNLDLVIPGGAAIIPNVSGDIRCEKGERKHFRSDVLPFHQMAERFNEALNISGKVPLGFFNTMFSLNGTWQSDASATKALAVDCWVISLYNMQIFKTPKNLKEEVKKAVPPFWEPADGWFMSLYNMQISKTPQNLKEEVKKAVPPFWEPAALARFIEKYGTHIIMSVKIGGKDVVYIRQYQSSTLSPGEIKKYLKEIADQRFAEGSGHDISNMQSKEKSSDPLTSTNHAHRLQMANTHTSASFTAKGDVEVIFRRRGGDCTVKHHSDWLATVPSSPDVMAMTFIPITSLLNEVPGSGFLSHAINLYLRYKPPIEELQFFLEFQIPRQWSPGFDLPIVPQRKEPVCPSLQFSLMGPKIYVSTNQVTVGRRPVTGLRLFLEGKKGNRLAIHLQHLSSLPKILQPHWDQHIPIGLPVWKEPEEQDSKWFEPVQWKSFSHVSTAPIEYLKESYVGETSAVYIVTGAQLRVWDFGLKNVLFLRLLFLKVPGCSVKRTIWDHSPESSQKSGLFSQLAVSKTFSSAHKAKPAPVVLNSAVLPEGPHVPVQSLKFLKFVDVKEMMKGAQDMPGHWLVTGAKLDVDRGKIALRVKYSLLHY

SEQ ID NO: 1168 - protein, 507 aa, Huperzia goebelii (Holub)
MQISKTPKNLKEEVKKAVPPFWEPAALARFIEKYGTHIIMSVKIGGRDVVYIKQYQSSTLSPEEIKRYLREIADQRFAEGSGQGISNMQSKEKSSDLLTLSPEEIKRYLREIADQRFAEGSGQGISNMQSKEKSSDLLTSANHAHRLQMANTHTSTSFTAKGDVEVIFRRRGGDCTVKHHSDWLATVPSSPDVMSMTFIPITSLLNEVPGSGFLSHAINLYLRYKPPIEELQFFLEFQIPRQWSPGFDLPLVPQRKEPVCPSLQFSLMGPKVYVSTNQVTVGRRPVTGLRLSLEGKKGNRLAIHLQHLSNLPKILQPHWDQHIPIGLPVWKEPEEQDSKWFEPVQWKSFSHVSTAPIEYLKESYVGETSAVYIVTGAQLRVWDFGLKNVLFLRLLFLKVPGCSVKRTVWDHSPESSQKSGLFSQLGLSTTFSSASKAKPVPVVLNSAVFPEGPPVPVQNLKFLKFVDVKEMMKGAQDMPGHWLVTGAKLDVDKGKIALRVKYSLLHY

SEQ ID NO: 1169 - protein, 605 aa, Huperzia nummulariifolia
MVWAGDQEMAQTEPDRMAAQAIAREALQALGRGFDVTLDLRLAYCKGPSGSHIIEFDEEANLDLVIPGGAAIIPNVSGDIRCEKGERTHFRSDVLPFHEMAERFNDALNISGKVPLGFFNTMFSLNGTWQSDASATKALAVDGWFMSLYNMQISKTPQNLKEEVKKAVPPFWEPAALARFIEKYGTHIIMSVKIGGKDVVYIRQYQSSTLSPGEIKKYLKEIADQRFAEGSGHDISNMQSKEKSSDPLTSTNHAHRLQMANTHTSASFTAKGDVEVIFRRRGGDCTVKHHSDWLATVPSSPDVMAMTFIPITSLLNEVPGSGFLSHAINLYLRYKPPIEELQFFLEFQIPRQWSPGFDLPLVPQRKEPVCPSLQFSLMGPKIYVSTNQVTVGRRPVTGLRLFLEGKKGNRLAIHLQHLSNLPKILQPHWDQHIPIGLPVWKEPEEQDSKWFEPVQWKSFSHVSTAPIEYLKESYVGETSAVYIVTGAQLRVWDFGLKNVLFLRLLFLKVPGCSVKRTIWDHSPESSQKSGLFSQLAVSKTFSSAHKAKPAPVVLNSAVLPEGPHVPVQSLKFLKFVDVKEMMKGAQDMPGHWLVTGAKLDVDKGK

SEQ ID NO: 1170 - protein, 521 aa, Platycerium bifurcatum
MSERFNQALCISGKMPLGLFNSMYNLNGTWQSDASATKALAVDGWFMSLYNMQISKTPQNLKEEVKKAVPPFWEPAALARFIEKYGTHIIMSVKIGGKDVVYIRQYQSSTLSPGEIKKYLKEIADQRFAEGSGGSGHDISNMQSKEKSSDPLTSTNHAHRLQMANTHTSASFTAKGDVEVIFRRRGGDCTVKHHSDWLATVPSSPDVMAMTFIPITSLLNEVPGSGFLSHAINLYLRYKPPIEELQFFLEFQIPRQWSPGFDLPIVPQRKEPVCPSLQFSLMGPKIYVSTNQVTVGRRPVTGLRLFLEGKKGNRLAIHLQHLSNLPKILQPHWDQHIPIGLPVWKEPEEQDSKWFEPVQWKSFSHVSTAPIEYLKESYVGETSAVYIVTGAQLRVWDFGLKNVLFLRLLFLKVPGCSVKRTVWDHSPESSQKSGLFSQLGLSTTFSSASKARPAPVVLNSTVFPEGPPVPVQNLKFLKFVDVKEMMKGAQDMPGHWLVTGAKLDVDKGKIALRVKYSLLHY

SEQ ID NO: 1171 - protein, 617 aa, Huperzia squarrosa
MVWAGDQEMVQKEPDRMASQATAREALQALGRGFDVTLDLRLAYCKGPPGSCLIELDEEEKSDILIPGGAAIIPDVSRDIKCDNGERTHFSSEVLPFEQMSERFNQALSISGKMPLGLFNTMYSLNGTWQSDASATKALAVDGWFISLYNMQISKTPQSLKEEVIKAVPPFWEPAALASFIEKYGTHIIMSVKIGGKDVVYIRQYQSSPLSPGEIKRYLKEIADQRFAEGSEQFMSNVRSNEKSPIPLTSTSHAHRLQMANAYTSASFTTKGDVEVILRRRGGDCMVKHHSDWLATVPFSPDVIAMSFIPITALLNGVPGSGFLSHAINLYLRYKPPIEELRLFLEFQIPRQWSPGFDLPFGCQRKEPVYPSLQFSLMGPKLYVSTAQVTVGRRPVTGLRLCLEGKKGNRLAIHLQHLSNLPKILQPHWDQHLPIGLPVWKEPEEQDSKWFEPVQWKSFSHVSTAPIEYRRESYVGETSAVYIVTGAQLRVWDFGLKNVLFLRLLFLKVPGCSVKRSIWDHAPQASQKSGLFSQFGLSTNFTSAHKAKPAPVVLNSAVFPEGPPAPAQNLKLLKFVDVKEMSKGAQDVPGHWLVTGAKLDVDKGKIALRLKYSLLHY

SEQ ID NO: 1172 - protein, 388 aa, Huperzia salvinioides
MVWAGHQQMAQKEPGKLAAEVTAREAVQAIGRGFDVTLDLRLAYCKGPAGSRLIELDEEKNVDMVIPGGGFVLQGVSRDIRCDKGERTRFRSEVLSFHHMSERFNQALCISGKMPLGLFNAMYNLNGTWQSDASATKSLALDGWFISLYNLQLRKASLTLKEEVKEAVPSVWEPAALARFIDRYGTHIIESVKVGGKDVVYTRQYQSSPLTPGDIQKYLKELADQRFAEGSGQNNVNMRAKEKSLDPFTVTNHAHRLQLASTNTSSSFTAKGDVEVNYKRRGGDNLVRFHGDWLATVPLSPDVVSMSFVPITSLLNGVPGSGFLSHAINLYLRYKPPIEELRSFLEFQIPRQWCPGFDLPLGPQRKEPVCPSLQFSFMGPKLYINTAQ

SEQ ID NO: 1173 - protein, 497 aa, Huperzia tetratoides
MGMVWAGDQMAYREAERTIAQSTAIEALQCLGRGFDVTLDLRLAYCKGPSGSRLVELSEETYPEIVLPGGVVIPNVSKDIKCDKGERTHFRSEVLTFHQMSTRFNEALSITGKMPLGLFNTMFSFNGTWQGDASETKALALDGWFITLYNMQITKPELSLNEEVKKAVPSSWEPAALARFIEKYGTHIIVSVKLGGKDVVYLKQFESSLLSSGEVQKYLKVIADQRFSEEAGQNISDTRLKDKSPDPLTSTNHAQRLQMASNVTSSSFSPIKDVEVILRRRGGDSLVKHHNDWLATVSSAPDVVSMSFVAISSLLNGVPGSGFLSHAVNLYLRYKPPIEELQFFLEFQIPKQWSPGFDLPLGPQRKGPVCPAMQFSLMGPKLYVCTTQVTVGRRPVTGLRLFLEGKKGNRLTIHLQHLSNLPKILQPHWDQHIAIGPPIWKEPEEQDSKWFEPVQWKSFSHVSTAPLEYLVESYVGEINATYIVTGAQLRVWDFGIK

SEQ ID NO: 1174 - protein, 348 aa, Huperzia carinata
MVWARDQEMAQTDSDRMAAQATAREALQALGRGFDVTLDLRLAYCKGPPGSCLIELDEEEKSDILIPGGAAIIPDVSRDIKCDKGERTHFSSEVLPFEQMSERFNQALSIPGKVPLGLFNTMFSLNGTWQSDASATKALAVDGWFISLYNMQISKIPLRLKEEVKKAVPPCWEPAALASFIEKYGTHIITSVKIGGKDVVYIRQYQSSPLSPGEIKRYLTEIADQRFAEGSEQFMLNMRSNEKSPIPLTSTSHAHRLQMANTYTSASFTTKGDVEVIFRRRGGDCTVKHHSDWLATVPSSPDVVEMTFIPITSLLNEVPGSGFLSHAIKLYLRYKPPIEELWIFVSCY

SEQ ID NO: 1175 - protein, 345 aa, Huperzia carinata
MVWARDQEMAQTDSDRMAAQATAREALQALGRGFDVTLDLRLAYCKGPSGSHLIEFDEEANLDLVIPGGAAIIPNVSRDIRCEKGERKHFRSDVLPFHQMAERFNEALNISGKVPLGLFNTMFSFNGTWQSDASATKALAVDCWVISLYNMQISKTPKNLKEEVKKAVPPFWEPAALARFIEKYGTHIIMSVKIGGRDVVYIKQYQSSTLSPEEIKRYLREIADQRFAEGSGQGISNMQSKEKSSDPLTSTNHAHRLQMANTHTSASFTAKGDVEVIFRRRGGDCTVKHHSDWLATVPSSPDVVEMTFIPITSLLNEVPGNKPPIEELQFFLEFQIPRVWSPGFD

SEQ ID NO: 1176 - protein, 617 aa, Huperzia nummarifolia
MVWAGDQEMVQNEPDRMAAQAIAREALQALGRGFDVTLDLRLAYCKGPSGSRIIEFDEKSNLDLVIPGGAAIIPNVSGDIRCEKGERKHFRSDVLPFHQMAERFNEALNISGKVPLGFFNTMFSLNGTWQSDASATKALAVEGWFISLYNMQISKIPLRLKEEVKKAVPPCWEPAALASFIEKYGTHIITSVKIGGKDVVYIRQYQSSPLSPGEIKRYLKEIADQRFAEGSEQFMLNMRSNEKSPIPLTSTSHAHRLQMANTHTSASFTAKGDVEVIFRRRGGDCTVKHHSDWLATVPSSPDVMAMTFIPITSLLNEVPGSGFLSHAINLYLRYKPPIEELQFFLEFQIPRQWSPGFDLPIVPQRKEPVCPSLQFSLMGPKIYVSTNQVTVGRRPVTGLRLFLEGKKGNRLAIHLQHLSSLPKILQPHWDQHIPIGLPVWKEPEEQDSKWFEPVQWKSFSHVSTAPIEYLKESYVGETSAVYIVTGAQLRVWDFGLKNVLFLRLLFLKVPGCSVKRTIWDHSPESSQKSGLFSQLAVSKTFSSAHKAKPAPVVLNSAVLPEGPHVPVQSLKFLKFVDVKEMMKGAQDMPGHWLVTGAKLDVDRGKIALRVKYSLLHY

SEQ ID NO: 1177 - protein, 496 aa, Platycerium bifurcatum
MFSLNGTWQSDASATKALAVEGWFISLYNMQISKIPLRLKEEVKKAVPPCWEPAALASFIEKYGTHIITSVKIGGKDVVYIRQYQSSPLSPGEIKSYLKEIADQRFAEGSEQFMLNMRSNEKSPIPLTSTSHAHRLQMANAYTSASFTTKGDVEVILRRRGGDCMVKHHSDWLATVPFSPDVIAMSFIPITALLNGVPGSGFLSHAINLYLRYKPPIEELQFFLEFQIPRQWSPGFDLPIVPQRKEPVCPSLQFSLMGPKIYVSTNQVTVGRRPVTGLRLFLEGKKGNRLAIHLQHLSNLPKILQPHWDQHIPIGLPVWKEPEEQDSKWFEPVQWKSFSHVSTAPIEYLKESYVGETSAVYIVTGAQLRVWDFGLKNVLFLRLLFLKVPGCSVKRTVWDHSPESSQKSGLFSQLGLSTTFSSASKARPAPVVLNSTVFPEGPPVPVQNLKFLKFVDVKEMMKGAQDMPGHWLVTGAKLDVDKGKIALRLKYSLLHY

SEQ ID NO: 1178 - protein, 569 aa, Huperzia nummulariifolia (Blume)
MRERGIIEFDEEANLDLVIPGGAAIIPNVSRDIRCEKGERKHFRSDVLPFHQMAERFNDALNISGKVPSGFFNSVFSLNGTWQSDASAIKALAVDCWVISLYNMQISKTPQNLKEEVKKAVPPFWEPAALARFIEKYGTHIIMSVKIGGRDVVYIKQYQSSTLSPEEIKRYLREIADQRFAEGSGQGISNMQSKEKSSDPLTSANHAHRLQMANTHTSTSFTAKGDVEVIFRRRGGDCTVKHHSDWLDTVPSSPDVVEMTFIPITSLLNGVPGSGFLSHAIKLYLRYKPPIEELQFFLEFQIPRQWSPGFDLPLVPQRKEPVCPSLQFSLMGPKVYVSTNQVTVGRRPVTGLRLSLEGKKGNRLAIHLQHLSNLPKILQPHWDQHIPIGLPVWKEPEEQDSKWFEPVQWKSFSHVSTAPLEYLVESYVGEINSTYIVTGAQLRVWDFGIKNVLFLRLLFCRVPGCSIKRSFWDHTPQTSQKSNLFSQLGLSSISSARKAKPVPIVLNSAVYPDDPPTSTQTNKLLKFVDIKEMTKGAQDKPGHWLVTGAKLDVDGGKIALGVKYSLLHY

SEQ ID NO: 1179 - protein, 367 aa, Huperzia nummulariifolia (Blume)
MVWAGHQQMAQKEPGKLAAEVTAREAVQAIGRGFDVTLDLRLAYCKGPSGSRIIEFDEEANLDLVIPGGAAIIPNVSRDIRCEKGERKHFRSDVLPFHQVPGGAAIIPNVSRDIRCEKGERKHFRSDVLPFHQMAERFNDALNISGKVPSGFFNSVFSLNGTWQSDASAIKALAVDCWVISLYNMQISKTPQNLKEEVKKAVPPFWEPAALARFIEKYGTHIIMSVKIGGRDVVYIKQYQSSTLSPEEIKRYLREIADQRFAEGSGQGISNMQSKEKSSDPLTSANHAHRLQMANTHTSTSFTAKGDVEVILRRRGGDCMVKHHSDWLATVPFSPDVIAMSFIPITALLNGVPGSGFLSHAIKLYLR

SEQ ID NO: 1180 - protein, 617 aa, Platycerium bifurcatum
MVWAGDQEMAQTEPDRMAAQAIAREALQALGRGFDVTLDLRLAYCKGPSGSRIIEFDEKSNLDLVIPGGAAIIPNVSGDIRCEKGERKHFRSDVLPFHEMAERFNDALNISGKVPLGFFNTMFSLNGTWQSDASATKALAVDGWFMSLYNMQISKTPQNLKEEVKKAVPPFWEPAALARFIEKYGTHIIMSVKIGGKDVVYIRQYQSSTLSPGEIKKYLKEIADQRFAEGSGHDISNMQSKEKSSDPLTSTNHAHRLQMANTHTSASFTAKGDVEVIFRRRGGDCTVKHHSDWLATVPSSPDVMAMTFIPITSLLNEVPGSGFLSHAINLYLRYKPPIEELQFFLEFQIPRLWSPGFDLPLVPQRKEPVCPSLQFSLMGPKIYVSTNQVTVGRRPVTGLRLFLEGKKGNRLAIHLQHLSNLPKILQPHWDQHIPIGLPVWKEPEEQDSKWFEPVQWKSFSHVSTAPIEYLKESYVGETSAVYIVTGAQLRVWDFGLKNVLFLRLLFLKVPGCSVKRTIWDHSPESSQKSGLFSQLAVSKTFSSAHKAKPAPVVLNSAVLPEGPHVPVQSLKFLKFVDVKEMMKGAQDMPGHWLVTGAKLDVDKGKIALRVKYSLLHY

SEQ ID NO: 1181 - protein, 609 aa, Huperzia squarrosa
MTQTEPDRMVAQATAREALQALGRGFDVTLDLRLAYCKGPPGSCLIELDEEEKSDILIPGGAAIIPDVSRDIKCDNGERTHFSSEVLPFEQMSERFNQALSISGKMPLGLFNTMYSLNGTWQSDASATKALAVDGWFISLYNMQISKTPQSLKEEVIKAVPPFWEPAALASFIEKYGTHIIMSVKIGGKDVVYIRQYQSSPLSPGEIKRYLKEIADQRFAEGSEQFMSNVRSNEKSPIPLTSTSHAHRLQMANAYTSASFTTKGDVEVILRRRGGDCMVKHHSDWLATVPFSPDVIAMSFIPITALLNGVPGSGFLSHAINLYLRYKPPIEELRLFLEFQIPRQWSPGFDLPFGCQRKEPVYPSLQFSLMGPKLYVSTAQVTVGRRPVTGLRLCLEGKKGNRLAIHLQHLSNLPKILQPHWDQHLPIGLPVWKEPEEQDSKWFEPVQWKSFSHVSTAPIEYRRESYVGETSAVYIVTGAQLRVWDFGLKNVLFLRLLFLKVPGCSVKRSIWDHAPQASQKSGLFSQFGLSTNFTSAHKAKPAPVVLNSAVFPEGPPAPAQNLKLLKFVDVKEMSKGAQDVPGHWLVTGAKLDVDKGKIALRVKYSLLHY

SEQ ID NO: 1182 - protein, 628 aa, Platycerium bifurcatum
MVWAGDQEMAQTEPDRMAAQAIAREALQALGRGFDVTLDLRLAYCKGPSGSRIIEFDEKSNLDLVIPGGAAIIPNVSGDIRCEKGERTHFRSDVLPFHEMAERFNDALNISGKVPLGFFNTMFSLNGTFSLNGTWQSDASATKALAVDGWFMSLYNMQISKTPQNLKEEVKKAVPPFWEPAALARFIEKYGTHIIMSVKIGGKDVVYIRQYQSSTLSPGEIKKYLKEIADQRFAEGSGAEGSGHDISNMQSKEKSSDPLTSTNHAHRLQMANTHTSASFTAKGDVEVIFRRRGGDCTVKHHSDWLATVPSSPDVMAMTFIPITSLLNEVPGSGFLSHAINLYLRYKPPIEELQFFLEFQIPRQWSPGFDLPIVPQRKEPVCPSLQFSLMGPKIYVSTNQVTVGRRPVTGLRLFLEGKKGNRLAIHLQHLSNLPKILQPHWDQHIPIGLPVWKEPEEQDSKWFEPVQWKSFSHVSTAPIEYLKESYVGETSAVYIVTGAQLRVWDFGLKNVLFLRLLFLKIPGCSVKRSVWDHTPQASQKSGLFSQFGLSTNFTSAHKAKPAPVVLNSAVFPEGPPAPAQNLKLLKFVDVKEMSKGAQDVPGHWLVTGAKLDVDKGKIALRLKYSLLHY

SEQ ID NO: 1183 - protein, 517 aa, Huperzia phlegmaria
MAERFNEALSISGKVPLGLFNTVFSLNGTWQSDASAIKALAVDCWVISLYNMQISRTPKNLKEEVKKAVPPFWEPAALARFIEKYGTHIIMSVKIGGKDVVYLRQYQSSTLSPGEIKKYLKEIADQRFAEGSGHDISNMQSKEKSSDPLTSTNHAHRLQMANAHTSASFTAKGDVEVIFRRRGGDCTVKHHSDWLDTVPSSPDVVEMTFIPITSLLNEVPGSGFLSHAIKLYLRYKPPIEELQFFLEFQIPRQWSPGFDLPIVPQRKEPVCPSLQFSLMGPKVYVSTNQVTVGRRPVTGLRLFLEGKKGNRLAIHLQHLSNLPKILQLHWDQHIPIGLPVWKEPEEQDSKWFEPVQWKSFSHVSTAPLEYLVESYVGEINSTYIVTGAQLRVWDFGIKNVLFLRLLFCRVPGCSIKRSFWDHTPQASQKSNLFSQLGLSSTSSARKAKPVPIVLNSAVYPDDPPTSTQTNKLLKFVDNKEMTKGAQDKPGHWLVTGAKLDVDGGKIALGVKYSLLHY

SEQ ID NO: 1184 - protein, 482 aa, Huperzia phlegmoides
MGIDWAGDQMAYREAERTIAQSTAIEALQCLGRGFDVTLDLRLAYCKGPSGSLLVELSEETYPEIVLPGGAVITNVSKDIKCDKGERTHFRSEVLTFHQMSTRFNEALSITGKMPLGLFNTMFSFNGTWQGDASETKALALDGWFITLYNMQITKPELSLNEEVKKAVPSSWEPAALARFIEKYGTHIIVSVKLGGKDVVYLKQYESSLLSSGEVQKYLKVIADQRFSEEAGQNISDTHLKDKLPDPLTSTNHAHRLQMASNFTSSSFTTIKDVEVIVRRRGGDSLVKRHNDWLATVSSAPDVVSMSFVAISSLLNGVPGSGFLSHAVNLYLRYKPPIEELQFFLEFQIPKQWSPGFDLPLGPQRKGPVCPVMQFSLMGPKLYVCTTQVTVGRRPVTGLRLFLEGKKGNRLTIHLQHLSNLPKILQPHWDQHIAIGPPIWKEPEEQDSKWFEPVQWKSFSHGARMLNKEILLGSHSTGFTEV

SEQ ID NO: 1185 - protein, 620 aa, Platycerium bifurcatum
MVWAGDQEMAQTEPDRMAAQAIAREALQALGRGFDVTLDLRLAYCKGPSGSRIIEFDEKSNLDLVIPGGAAIIPNVSGDIRCEKGERTHFRSDVLPFHEMAERFNDALNISGKVPLGFFNTMFSLNGTWQSDASATKALAVDGWFMSLYNMQISKTPQNLKEEVKKAVPPFWEPAALARFIEKYGTHIIMSVKIGGKDVVYIRQYQSSTLSPGEIKKYLKEIADQRFAEGSGGSGHDISNMQSKEKSSDPLTSTNHAHRLQMANTHTSASFTAKGDVEVIFRRRGGDCTVKHHSDWLATVPSSPDVMAMTFIPITSLLNEVPGSGFLSHAINLYLRYKPPIEELQFFLEFQIPRQWSPGFDLPIVPQRKEPVCPSLQFSLMGPKIYVSTNQVTVGRRPVTGLRLFLEGKKGNRLAIHLQHLSNLPKILQPHWDQHIPIGLPVWKEPEEQDSKWFEPVQWKSFSHVSTAPIEYLKESYVGETSAVYIVTGAQLRVWDFGLKNVLFLRLLFLKIPGCSVKRSVWDHTPQASQKSGLFSQFGLSTNFTSAHKAKPAPVVLNSAVFPEGPPAPAQNLKLLKFVDVKEMSKGAQDVPGHWLVTGAKLDVDKGKIALRLKYSLLHY

SEQ ID NO: 1186 - protein, 409 aa, Huperzia phlegmoides
MVWAGDQEMAQTDSDRMAAQATAREALQALGRGFDVTLDLRLAYCKGPSGSHIIEFDEEANLDLVIPGGAAIIPNVSRDIRCEKGERKHFRSDVLPFHQMAERFNEALNIYGKVPLGLFNTMFSFNGTWQSDASATKALAVDCWVISLYNMQISKTPKNLKEEVKKAVPPFWEPAALARFIEKYGTHIIMSVKIGGKDVVYLRQYQSSTLSPEEIKRYLREIADQRFAEGSGHDISNMQSKDQSSTLSPEEIKRYLREIADQRFAEGSGQGISNMQSKEKSSDPLTSTNHAHRLQMANTHTSASFTAKGDVEVIFRRRGGDCTVKHHSDWLATVPSSPDVVAMTFIPITSLLNEVPGSGLLSHAINLYLRYKPCSSSWNFRFLDSGLQVLTCQLSPREKNLYVLHCNSA

SEQ ID NO: 1187 - protein, 356 aa, Huperzia carinata
MVWARDQEMAQTDSDRMAAQATAREALQALGRGFDVTLDLRLAYCKGPSGSHLIEFDEEANLDLVIPGGAAIIPNVSRDIRCEKGERKHFRSDVLPFHQMAERFNEALNISGKVPLGLFNTMFSFNGTWQSDASATKALAVDCWVISLYNMQISKTPKNLKEEVKKAVPPFWEPAALARFIEKYGTHIIMSVKIGGRDVVYIKQYQSSTLSPEEIKRYLREIADQRFAEGSGQGISNMQSKEKSSDPVTSANHAHRLQMANTHTSTSFKAKGDVEVIFRRKGGDCTVKHHSDWLATVPSSPDVVEMTFIPITSLLNEVPGSGFLSHAIKLYLRYKPPIEELQFFLEFQIPRVVSRF

SEQ ID NO: 1188 - protein, 384 aa, Platycerium bifurcatum
MVWAGDQEMVQNEPDRMAAQATAREAMQALGRGFDVTLDLRLAYCKGPPGSCLIELDEEEKSDILIPGGAAIIPDVSRDIKCDKGERTHFSSEVLPFEQMSERFNQALSIPGKVPLGLFNTMFSLNGTWQSDASATKALAVEGWFISLYNMQISKIPLRLKEEVKKAVPPCWEPAALASFIEKYGTHIITSVKIGGKDVVYIRQYQSSPLSPGEIKSYLKEIADQRFAEGSEQFMLNMRSNEKSPIPLTSTSHAHRLQMANAYTSASFTTKGDVEVILRRRGGDCMVKHHSDWLATVPFSPDVIAMSFIPITALLNGVPGSGFLSHAINLYLRYKPPIEELQFFLEFQIPRLWSPGFDLPLVPQRKEPVCPSLQFSLMGVVSRF

SEQ ID NO: 1189 - protein, 597 aa, Huperzia carriata (Philippines)
MGIDWAGDQMAYREAERTIAQSTAIEALQCLGRGFDVTLDLRLAYCKGPSGSLLVELSEETYPEIVLPGGVVITNVSKDIKCDKGERTHFRSEVLTFHQMSTRFNEALSITGKMPLGLFNTMFSFNGTWQGDASETKALALDGWFITLYNMQITKPELSLNEEVKKAVPSSWEPAALARFIEKYGTHIIVSVKLGGKDVVYLKQYESSLLSSGEVQKYLKVIADQRFSEEAGQNISDTHLKDKLPDPLTSTNHAHRLQMASNFTSSSLTTIKDVEVIVRRRGGDSLVKRHNDWLATVSSAPDVVSMSFVAISSLLNGVPGSGFLSHAVNLYLRYKPPIEELQFFLEFQIPKQWSPGFDLPLGPQRKGPVCPAMQFSLMGPKLYVCTTQVTVGRRPVTGLRLFLEGKKGNRLTIHLQHLSNLPKILQPHWDQHIAIGPPIWKEPEEQDSKWFEPVQWKSFSHVSTAPIEYLQESYIGETSAVYIVTGAQLRVWDFGLKNVLFLRLLFLKVPGCSVKRTVWDHSPESSQKSGLFSQLAVSKTFSSAHKAKPAPVVLNSAVLPEGPHVPVQSLKFLKFVDVKEMIKGAITTIVFSVLFLL

SEQ ID NO: 1190 - protein, 608 aa, Huperzia carriata (Philippines)
MAQTDSDRMAAQATAREALQALGRGFDVTLDLRLAYCKGPSGSRIIEFDEEANLDLVVPGGAAIIPNVSGDIRCEKGERTHFISDVLPFHQMAERFNDALNISGKVPLGFFNTVFSLNGTWQSDASTTKALAVDGWFMSLYNMQISKTPQNLKEEVKKAVPPFWEPAALARFIEKYGTHIIMSVKIGGKDVVYLRQYQSSTLSPGEIKKYLKEIADQRFAEGSGQGISNMQSKEKSSDPVTSANHAHRLQMANTHTSTSFKAKGDVEVIFRRKGGDCTVKHHSDWLATVPSSPDVMSMTFIPITSLLNEVPGSGFLSHAINLYLRYKPPIEELQLFLEFQIPRQWSPGFDLPLVPQRKEPVCPSLQFSLMGPKVYVSTNQVTVGRRPVTGLRLSLEGKKGNRLAIHLQHLSNLPKILQPHWDQHIPIGLPVWKEPEEQDSKWFEPVQWKSFSHVSTAPLEYLVESYVGEINSTYIVTGAQLRVWDFGIKNVLFLRLLFCRVPGCSIKRSFWDHTPQASQKSNLFSQLGLSSISSARKAKPVPIVLNSAVFPDDPPQSTQTHKLLKFVDIKEMTKGAQDKPGHWLVTGAKLDVDGGKIALGVKYSLLHY

SEQ ID NO: 1191 - protein, 617 aa, Huperzia nummulariifolia
MVCAGDQEMAQTEPDRMAAQAIAREALQALGRGFDVTLDLRLAYCKGPSGSHIIEFDEEANLDLVIPGGAAIIPNVSGDIRCEKGERTHFRSDVLPFHEMAERFNDALNISGKVPLGFFNTMFSLNGTWQSDASATKALAVDGWFMSLYNMQISKTPQNLKEEVKKAVPPFWEPAALARFIEKYGTHIIMSVKIGGKDVVYIRQYQSSTLSPGEIKKYLKEIADQRFAEGSGHDISNMQSKEKSSDPLTSTNHAHRLQMANTHTSASFTAKGDVEVIFRRRGGDCTVKHHSDWLATVPSSPDVMAMTFIPITSLLNEVPGSGFLSHAINLYLRYKPPIEELQFFLEFQIPRQWSPGFDLPLVPQRKEPVCPSLQFSLMGPKIYVSTNQVTVGRRPVTGLRLFLEGKKGNRLAIHLQHLSNLPKILQPHWDQHIPIGLPVWKEPEEQDSKWFEPVQWKSFSHVSTAPIEYLKESYVGETSAVYIVTGAQLRVWDFGLKNVLFLRLLFLKVPGCSVKRTIWDHSPESSQKSGLFSQLAVSKTFSSAHKAKPAPVVLNSAVLPEGPHVPVQSLKFLKFVDVKEMMKGAQDMPGHWLVTGAKLDVDKGKIALRVKYSLLHY

SEQ ID NO: 1192 - protein, 588 aa, Huperzia nummulariifolia
MVWAGDQEMAQTEPDRMAAQAIAREALQALGRGFDVTLDLRLAYCKGPSGSHIIEFDEEANLDLVIPGGAAIIPNVSGDIRCEKGERTHFRSDVLPFHEMAERFNDALNISGKVPLGFFNTMFSLNGTWQSDASATKALAVDGWFMSLYNMQISKTPQNLKEEVKKAVPPFWEPAALARFIEKYGTHIIMSVKIGGKDVVYIRQYQSSTLSPGEIKKYLKEIADQRFAEGSGHDISNMQSKEKDVEVIFRRRGGDCTVKHHSDWLATVPSSPDVMAMTFIPITSLLNEVPGSGFLSHAINLYLRYKPPIEELQFFLEFQIPRQWSPGFDLPLVPQRKEPVCPSLQFSLMGPKIYVSTNQVTVGRRPVTGLRLFLEGKKGNRLAIHLQHLSNLPKILQPHWDQHIPIGLPVWKEPEEQDSKWFEPVQWKSFSHVSTAPIEYLKESYVGETSAVYIVTGAQLRVWDFGLKNVLFLRLLFLKVPGCSVKRTIWDHSPESSQKSGLFSQLAVSKTFSSAHKAKPAPVVLNSAVLPEGPHVPVQSLKFLKFVDVKEMMKGAQDMPGHWLVTGAKLDVDKGKIALRVKYSLLHY

SEQ ID NO: 1193 - protein, 609 aa, Huperzia squarrosa
MTQTEPDRMVAQATAREALQALGRGFDVTLDLRLAYCKGPPGSCLIELDEEEKSDILIPGGAAIIPDVSRDIKCDNGERTHFSSEVLPFEQMSERFNQALSISGKMPLGLFNTMYSLNGTWQSDASATKALAVDGWFISLYNMQISKTPQSLKEEVIKAVPPFWEPAALASFIEKYGTHIIMSVKIGGKDVVYIRQYQSSPLSPGEIKRYLKEIADQRFAEGSEQFMSNVRSNEKSPIPLTSTSHAHRLQMANAYTSASFTTKGDVEVILRRRGGDCMVKHHSDWLATVPFSPDVIAMSFIPITALLNGVPGSGFLSHAINLYLRYKPPIEELRLFLEFQIPRQWSPGFDLPFGCQRKEPVYPSLQFSLMGPKLYVSTAQVTVGRRPVTGLRLCLEGKKGNRLAIHLQHLSNLPKILQPHWDQHLPIGLPVWKEPEEQDSKWFEPVQWKSFSHVSTAPIEYRRESYVGETSAVYIVTGAQLRVWDFGLKNVLFLRLLFLKVPGCSVKRSIWDHAPQASQKSGLFSQFGLSTNFTSAHKAKPAPVVLNSAVFPEGPPAPAQNLKLLKFVDVKEMTKGAHDTPGHWLVTGARLDADRGKIALRVKYALLLY

SEQ ID NO: 1194 - protein, 449 aa, Platycerium bifurcatum
MVWAGDQEMVQNEPDRMAAQAIAREALQALGRGFDVTLDLRLAYCKGPSGSRIIEFDEKSNLDLVIPGGAAIIPNVSGDIRCEKGERTHFRSDVLPFHEMAERFNDALNISGKVPLGFFNTMFSLNGTWQSDASATKALAVDGWFMSLYNMQISKTPQNLKEEVKKAVPPFWEPAALARFIEKYGTHIIMSVKIGGKDVVYIRQYQSSTLSPGEIKKYLKEIADQRFAEGSGHDISNMQSKEKSSDPLTSTNHAHRLQMANTHTSASFTAKGDVEVIFRRRGGDCTVKHHSDWLATVPSSPDVMAMTFIPITSLLNEVPGSGFLSHAINLYLRYKPPIEELQFFLEFQIPRQWSPGFDLPIVPQRKEPVCPSLQFSLMGPKIYVSTNQVTVGRRPVTGLRLFLEGKKGNRLAIHLQHLSNLPKILQPHWDQHIPIGLPVWKEPEEQDSK

SEQ ID NO: 1195 - protein, 617 aa, Huperzia nummarifolia
MVWAGDQEMAQTEPDRMAAQAIAREALQALGRGFDVTLDLRLAYCKGPSGSRIIEFDEKSNLDLVIPGGAAIIPNVSGDIRCEKGERKHFRSDVLPFHQMAERFNEALNISGKVPLGFFNTMFSLNGTWQSDASATKALAVEGWFISLYNMQISKIPLRLKEEVKKAVPPCWEPAALASFIEKYGTHIITSVKIGGKDVVYIRQYQSSPLSPGEIKRYLKEIADQRFAEGSEQFMLNMRSNEKSPIPLTSTSHAHRLQMANAYTSASFTTKGDVEVILRRRGGDCMVKHHSDWLATVPFSPDVIAMSFIPITALLNGVPGSGFLSHAINLYLRYKPPIEELQFFLEFQIPRQWSPGFDLPIVPQRKEPVCPSLQFSLMGPKIYVSTNQVTVGRRPVTGLRLFLEGKKGNRLAIHLQHLSSLPKILQPHWDQHIPIGLPVWKEPEEQDSKWFEPVQWKSFSHVSTAPIEYLKESYVGETSAVYIVTGAQLRVWDFGLKNVLFLRLLFLKVPGCSVKRTIWDHSPESSQKSGLFSQLAVSKTFSSAHKAKPAPVVLNSAVLPEGPHVPVQSLKFLKFVDVKEMMKGAQDMPGHWLVTGAKLDVDRGKIALRVKYSLLHY

SEQ ID NO: 1196 - protein, 617 aa, Platycerium bifurcatum
MVWAGDQEMVQNEPDRMAAQATAREAMQALGRGFDVTLDLRLAYCKGPPGSCLIELDEEEKSDILIPGGAAIIPDVSRDIKCDKGERTHFSSEVLPFEQMSERFNQALSIPGKVPLGLFNTMFSLNGTWQSDASATKALAVEGWFISLYNMQISKIPLRLKEEVKKAVPPCWEPAALASFIEKYGTHIITSVKIGGKDVVYIRQYQSSPLSPGEIKSYLKEIADQRFAEGSEQFMLNMRSNEKSPIPLTSTSHAHRLQMANAYTSASFTTKGDVEVILRRRGGDCMVKHHSDWLATVPFSPDVIAMSFIPITALLNGVPGSGFLSHAINLYLRYKPPIEELQFFLEFQIPRLWSPGFDLPLVPQRKEPVCPSLQFSLMGPKIYVSTNQVTVGRRPVTGLRLFLEGKKGNRLAIHLQHLSNLPKILQPHWDQHIPIGLPVWKEPEEQDSKWFEPVQWKSFSHVSTAPIEYLKESYVGETSAVYIVTGAQLRVWDFGLKNVLFLRLLFLKIPGCSVKRSVWDHTPQASQKSGLFSQFGLSTNFTSAHKAKPAPVVLNSAVFPEGPPAPAQNLKLLKFVDVKEMSKGAQDVPGHWLVTGAKLDVDKGKIALRLKYSLLHY

SEQ ID NO: 1197 - protein, 620 aa, Huperzia carriata (Solomon Islands)
MVWAGDQEMAQIEPDRMAAQATAREALQALGRGFDVTLDLRLAYCKGPSGSRIIEFDEEANLDLVIPGGAAIIPNVSGDIRCEKGERTHFISDVLPFHQMAERFNDALNISGKVPLGFFNTVFSLNGTWQSDASTTKALAVDGWFMSLYNMQISKTPKNLKEEVKKAVPPFWEPAALARFIEKYGTHIIMSVKIGGKDAVYLRQYQSSTLSPGEIKKYLKEIADQRFAEGSGQGISNMQSKEKSSDPLTSTNHAHRLQMANTHTSASFTAKGDVEVIFRRRGGDCTVKHHSDWLATVPSSPDVMSMTFIPITSLLNDVPGSGFLSHAINLYLRYKPPIEELQFFLEFQIPRQWSPGFDLPIVPQRKEPVCPSLQFSLMGPKVYVSTNQVTVGRRPVTGLRLFLEGKKGNRLAIHLQHLSNLPKILQPHWDQHLPIGLPVWKEPEEQDSKWFEHVQWKSFSHVSTAPIEYRRESYVGETSAVYIVTGAQLRVWDFGLKNVLFLRLLFLKVPGCSVKRSVWDHTPQASQKSGLFSQFGLSTNFTSAHKAKPAPVVLNSAVFPEGPPAPAQNLKLLKFVDVKEMSKGAQDVPGLPGHWLVTGAKLDVDKGKIALRLKYSLLHY

SEQ ID NO: 1198 - protein, 507 aa, Huperzia goebelii (Holub)
MQISKTPKNLKEEVKKAVPPFWEPAALARFIEKYGTHIIMSVKIGGRDVVYIKQYQSSTLSPEEIKRYLREIADQRFAEGSGQGISNMQSKEKSSDLLTLSPEEIKRYLREIADQRFAEGSGQGISNMQSKEKSSDLLTSANHAHRLQMANTHTSTSFTAKGDVEVIFRRRGGDCTVKHHSDWLATVPSSPDVMSMTFIPITSLLNEVPGSGFLSHAINLYLRYKPPIEELQFFLEFQIPRQWSPGFDLPLVPQRKEPVCPSLQFSLMGPKVYVSTNQVTVGRRPVTGLRLSLEGKKGNRLAIHLQHLSNLPKILQPHWDQHIPIGLPVWKEPEEQDSKWFEPVQWKSFSHVSTAPIEYLKESYVGETSAVYIVTGAQLRVWDFGLKNVLFLRLLFLKVPGCSVKRSVWDHTPQASQKSGLFSQFGLSTNFTSAHKAKPAPVVLNSAVFPEGPPAPAQNLKLLKFVDVKEMLKGAQDVPGHWLVTGAKLDVDRGKIALRLKYSLLHY

SEQ ID NO: 1199 - protein, 400 aa, Huperzia phlegmoides
MVWAGDQEMAQTDSDRMAAQATAREALQALGRGFDVTLDLRLAYCKGPSGSHIIEFDEEANLDLVIPGGAAIIPNVSRDIRCEKGERKHFRSDVLPFHQMAERFNEALNIYGKVPLGLFNTMFSFNGTWQSDASATKALAVDCWVISLYNMQISKTPKNLKEEVKKAVPPFWEPAALARFIEKYGTHIIMSVKIGGKDVVYLRQYQSSTLSPEEIKRYLREIADQRFAEGSGHDISNMQSKDQSSTLSPEEIKRYLREIADQRFAEGSGQGISNMQSKEKSSDPLTFANTHTSTSFKAKGDVEVIFRRRGGDCTVKHHSDWLATVPSSPDVVAMTFIPITSLLNEVPGSGLLSHAINLYLRYKPCSSSWNFRFLDSGLQVLTCQLSPREKNLYVLHCNSA

SEQ ID NO: 1200 - protein, 508 aa, Huperzia tetratoides
MVSAGHRQMAQKEPGKLAAEVTAREAVQAIGRGFDVTLDLRLAYCKGPAGSRLIELDEEKNVDMVIPGGGFVLRGVSRDIRCDKGERTRFRSEVLSFHHMSERFNQALSISGKMPLGLFNTMYSLNGTWQSDASATKSLALDGWFISLYNLQLRKASLTLKEEVKEAVPSVWEPAALARFIDKYGTHIIESVKVGGKDVVYTRQYQSSPLTSGDIQKYLKELADQRFAEGSGTNNVNMRAKEKSPDPFTVTNHAHRLQLASTNTSSSFTAKGDVEVNFKRRGGDNLVRFHGDWLATVPLSPDVISMSFVPITSLLNGVPGSGFLSHAVNLYLRYKPPIEELRSFLEFQIPRQWSPGFDLPLGPQRKEPACPSLQFSFMGPKLYINTAQVIVGRRPVTGLQLFLEGKKGNRLAIHLQHLSNLPKILQPHWGQHISVGPPVWKQPEEQDTKWFEPVQWKSFSHYNICRIFLRSFNLIGANIYLLGRLYGSSPKSKIPNGLNRFNGKASLM

SEQ ID NO: 1201 - protein, 571 aa, Huperzia tetratoides
MVSAGHRQMAQKEPGKLAAEVTAREAVQAIGRGFDVTLDLRLAYCKGPAGSRLIELDEEKNVDMVIPGGGFVLRGVSRDIRCDKGERTRFRSEVLSFHHMSERFNQALSISGKMPLGLFNTMYSLNGTWQSDASATKSLALDGWFISLYNLQLRKASLTLKEEVKEAVPSVWEPAALARFIDKYGTHIIESVKVGGKDVVYTRQYQSSPLTSGDIQKYLKELADQRFAEGSGTNNVNMRAKEKSPDPFTVTNHAHRLQLASTNTSSSFTAKGDVEVNFKRRGGDNLVRFHGDWLATVPLSPDVISMSFVPITSLLNGVPGSGFLSHAVNLYLRYKPPIEELRSFLEFQIPRQWSPGFDLPLGPQRKEPACPSLQFSFMGPKLYINTAQVIVGRRPVTGLQLFLEGKKGNRLAIHLQHLSNLPKILQPHWGQHISVGPPVWKQPEEQDTKWFEPVQWKSFSHVSTAPIEYGKEDDLIANIVTGAQLQVWELGAKKVLFLRLLFSKVPGCSIKTSFWDHTPQSSQKSGLFSQLGLSTNFTSARKAKPAAVILNSAIFPEGPPAACEGDDQGCS

SEQ ID NO: 1202 - protein, 617 aa, Huperzia nummarifolia
MGIDWAGDQMAYREAERTIAQSTAIEALQCLGRGFDVTLDLRLAYCKGPSGSLLVELSEETYPEIVLPGGVVITNVSKDIKCDKGERTHFRSEVLTFHQMSTRFNEALSITGKMPLGLFNTMFSFNGTWQGDASETKALALDGWFITLYNMQITKPELSLNEEVKKAVPSSWEPAALARFIEKYGTHIIVSVKLGGKDVVYLKQYESSLLSSGEVQKYLKVIADQRFSEEAGQNISDTHLKDKLPDPLTSTNHAHRLQMASNFTSSSFTTIKDVELIVRRRGGDSLVKRHNDWLATVSSAPDVVSMSFVAISSLLNGVPGSGFLSHAVNLYLRYKPPIEELQFFLEFQIPKQWSPGFDLPLGPQRKGPVCPAMQFSLMGPKLYVCTTQVTVGRRPVTGLRLFLEGKKGNRLTIHLQHLSNLPKILQPHWDQHIAIGPPIWKEPEEQDSKWFEPVQWKSFSHVSTAPIEYLKESYVGETSAVYIVTGAQLRVWDFGLKNVLFLRLLFLKVPGCSVKRTIWDHSPESSQKSGLFSQLAVSKTFSSAHKAKPAPVVLNSAVLPEGPHVPVQSLKFLKFVDVKEMMKGAQDMPGHWLVTGAKLDVDRGKIALRVKYSLLHY

SEQ ID NO: 1203 - protein, 518 aa, Huperzia phlegmaria
MAERFNEALSISGKVPLGLFNTVFSLNGTWQSDASAIKALAVDCWVISLYNMQISRTPKNLKEEVKKAVPPFWEPAALARFIEKYGTHIIMSVKIGGKDVVYLRQYQSSTLSPGEIKKYLKEIADQRFAEGSGHDISNMQSKEKSSDPLTSTNHAHRLQMANAHTSASFTAKGDVEVIFRRRGGDCTVKHHSDWLDTVPSSPDVVEMTFIPITSLLNEVPGSGFLSHAIKLYLRYKPPIEELQFFLEFQIPRQWSPGFDLPIVPQRKEPVCPSLQFSLMGPKVYVSTNQVTVGRRPVTGLRLFLEGKKGNRLAIHLQHLSNLPKILQLHWDQHIPIGLPVWKEPEEQDSKWFEHVQWKSFSHVSTAPIEYRRESYVGETSAVYIVTGAQLRVWDFGLKNVLFLRLLFLKVPGCSVKRSVWDHTPQASQKSGLFSQFGLSTNFTSAHKAKPAPVVLNSAVFPEGPPAPAQNLKLLKFVDVKEMSKGAQDVPGHWLVTGAKLDVDKGKIALRLKYSLLHY

SEQ ID NO: 1204 - protein, 518 aa, Platycerium bifurcatum
MAERFNDALNISGKVPLGFFNTMFSLNGTWQSDASATKALAVDGWFMSLYNMQISKTPQNLKEEVKKAVPPFWEPAALARFIEKYGTHIIMSVKIGGKDVVYIRQYQSSTLSPGEIKKYLKEIADQRFAEGSGHDISNMQSKEKSSDPLTSTNHAHRLQMANTHTSASFTAKGDVEVIFRRRGGDCTVKHHSDWLATVPSSPDVMAMTFIPITSLLNEVPGSGFLSHAINLYLRYKPPIEELQFFLEFQIPRLWSPGFDLPLVPQRKEPVCPSLQFSLMGPKIYVSTNQVTVGRRPVTGLRLFLEGKKGNRLAIHLQHLSNLPKILQPHWDQHIPIGLPVWKEPEEQDSKWFEPVQWKSFSHVSTAPIEYLKESYVGETSAVYIVTGAQLRVWDFGLKNVLFLRLLFLKVPGCSVKRTIWDHSPESSQKSGLFSQLAVSKTFSSAHKAKPAPVVLNSAVLPEGPHVPVQSLKFLKFVDVKEMMKGAQDMPGHWLVTGAKLDVDKGKIALRVKYSLLHY

SEQ ID NO: 1205 - protein, 345 aa, Huperzia phlegmaria
MKCCSILLALFCEGEGLVKDILISAPSRAFDTGRQGNEDGHSMVWAGDQEMAQIEPDRMAAQATAREALQALGRGFDVTLDLRLAYCKGPSGSRIIEFDEEANLDLVIPGGVAIIPNVSGDIRCEKGERTHFISDVLSFHQMAERFNEALNISGKVPSGFFNTVFSLNGTWQSDASAIKALAVDCWVISLYNMQISRTPKNLKEEVKKAVPPFWEPAALARFIEKYGTHIIMSVKIGGKDVVYLRQYQSSTLSPGEIKKYLKEIADQRFAEGSGHDISNMQSKEKSSDPLTSANHAHRLQMANTHTSTSFTAKGDVEVIFRRRGGDCTVKHHSDWLDLFLLPLMS

SEQ ID NO: 1206 - protein, 616 aa, Huperzia squarrosa
MGMVWAGDQMAYREAERTIAQSTAIEALQCLGRGFDVTLDLRLAYCKGPSGSRLVELSEETYPEIVLPGGVVIPNVSKDIKCDKGERTHFRSEVLPFHQMSTRFNEALSITGKMPLGLFNTMFNFNGTWQGDASETKALALDGWFITLYNMQITKPELSLNEEVKKAVPSSWEPAALARFIEKYGTHIIVSVKLGGKDVVYLKQYESSLLSSGEVQKYLKGIADQRFSEEAGQNISDTRLKDKLPDPLTSTNHAHRLQMASNFTSSSFTTIKDVEVILRRRGGDSLVKHHNDWLATVSSAPDVVSMSFVAISSLLNGVPGSGFLSHAVNLYLRYKPPIEELQFFLEFQIPKQWSPGFDLPFGPQRKGPVCPAMQFSLMGPKLYVCTTQVTVGRRPVTGLRLFLEGKKGNRLTIHLQHLSNLPKILQPHWDQHIAIGPPIWKEPEEQDSKWFEPVQWKSFSHVSTAPLEYLVESYVGEINATYIVTGAQLRVWDFGIKNVLFLRLLFCRVPGCSIKRSFWDHTPQASQKSNLFSQLGLSSTSSARKAKPVPIVLNSAIFPDDPPQSTQTHKLLKFVDIKEMTKGAQDKPGHWLVTGAKLDVDGGKIALGVKYSLLHY

SEQ ID NO: 1207 - protein, 620 aa, Platycerium bifurcatum
MVWAGDQEMAQTEPDRMAAQAIAREALQALGRGFDVTLDLRLAYCKGPSGSRIIEFDEKSNLDLVIPGGAAIIPNVSGDIRCEKGERTHFRSDVLPFHEMAERFNDALNISGKVPLGFFNTMFSLNGTWQSDASATKALAVDGWFMSLYNMQISKTPQNLKEEVKKAVPPFWEPAALARFIEKYGTHIIMSVKIGGKDVVYIRQYQSSTLSPGEIKKYLKEIADQRFAEGSGGSGHDISNMQSKEKSSDPLTSTNHAHRLQMANTHTSASFTAKGDVEVIFRRRGGDCTVKHHSDWLATVPSSPDVMAMTFIPITSLLNEVPGSGFLSHAINLYLRYKPPIEELQFFLEFQIPRQWSPGFDLPIVPQRKEPVCPSLQFSLMGPKIYVSTNQVTVGRRPVTGLRLFLEGKKGNRLAIHLQHLSNLPKILQPHWDQHIPIGLPVWKEPEEQDSKWFEPVQWKSFSHVSTAPIEYLKESYVGETSAVYIVTGAQLRVWDFGLKNVLFLRLLFLKVPGCSVKRTVWDHSPESSQKSGLFSQLGLSTTFSSASKARPAPVVLNSTVFPEGPPVPVQNLKFLKFVDVKEMMKGAQDMPGHWLVTGAKLDVDKGKIALRVKYSLLHY

SEQ ID NO: 1208 - protein, 333 aa, Huperzia nummulariifolia (Blume)
MVWAGHQQMAQKEPGKLAAEVTAREAVQAIGRGFDVTLDLRLAYCKGPSGSRIIEFDEEANLDLVIPGGAAIIPNVSRDIRCEKGERKHFRSDVLPFHQMAERFNDALNISGKVPSGFFNSVFSLNGTWQSDASAIKALAVDCWVISLYNMQISKTPQNLKEEVKKAVPPFWEPAALARFIEKYGTHIIMSVKIGGRDVVYIKQYQSSTLSPEEIKRYLREIADQRFAEGSGQGISNMQSKEKSSDPLTSANHAHRLQMANTHTSTSFTAKGDVEVIFRRRGGDCTVKHHSDWLDTVPSSPDVVEMTFIPITSLLNGVPGSGFLSHAIKLYLR

SEQ ID NO: 1209 - protein, 613 aa, Platycerium bifurcatum
MVWAGHQQMAQKEPGKFVAEVTAREAVQAIGRGFDVTLDLRLAYCKGPAGSRLIELDEEKNVDMVIPGGGFVLQGVSRDIRCDKGERTRFRSEVLSFHHMSERFNQALSIPGKVPLGLFNTMFSLNGTWQSDASATKSLALDGWFISLYNLQLRKASLTLKEEVKEAVPSVWEPAALARFIDKYGTHIIESVKVGGKDVVYTRQYQSSPLTPGDIQKYLKELADQRFAEGSGQNNVNMRAKEKSLDPFAVTNHAHRLQLASTNTSSSFTAKGDVEVNYKRRGGDNLVRFHGDWLATVPLSPDVISMSFVPITSLLNGVPGSGFLSHAINLYLRYKPPIEELRSFLEFQIPRQWCPGFDLPLGPQRKEPACPSLQFSFMGPKLYINTAQVIVGRRPVTGLQLFLEGKKGNRLAIHLQHLSNLPKILQPHWGQHIAVGPPVWKQPEELDTKWFEPVQWKSFSHVSTAPIEYGKEDDNIANIVTGAQLQVWDLGAKKVLFLRLLFSKVPGCSIKTSFWDHTPQSSQKSGLFSQLGLSTNFTSARKAKPAAVILNSAIFPEGPPAAVQKLKLLKFVDVKEMTKGAHDTPGHWLVTGARLDADRGKIALRVKYALLLY

SEQ ID NO: 1210 - protein, 614 aa, Huperzia tetratoides
MVWAGDQEMVQKEPDRMVAQATAREALQALGRGFDVTLDLRLAYCKGPPGSCLIELDEEEKSEILIPGGAAIIPDVSRDIKCDKGERTHFSSEVLPFEQMSERFNQALSISGKVPLGLFNTMFSLNGTWQSDASATKALAVDGWFISLYNMQISKTPQSLKEEVIKAVPPFWEPAALASFIEKYGTHIIMSVKIGGKDVVYIRQYQSSPLSPGEIKRYLKEIADQRFAEGSEQFMSNTRSNEKSPIPLTSTSHAHRLQMANAYTSASFTTKGDVEVILRRRGGDCMVKHHSDWLATVPFSPDVIAMSFIPITSLLNGVPGSGFLSHAISLYLQYKPPIEELQLFLEFQIPRQWSPGFDLPFGCQRKEPVYPSLQFSLMGPKLYVSTAQVTVGRRPVTGLRLCLEGKKGNRLAIHLQHLSNLPKILQPHWDQHIPIGLPVWKEPEEQDSKWFEPVQWKSFSHVSTAPIEYREESYVGETSAVYIVTGAQLRVWDFGLKNVLFLRLLFLKVPGCSVKRTVWDHSPESSQKSSLFPQLGLSTTFSSACKAKPAPVESNSTVFTEGDVKSLKFLKFVDIKEMTKGAQDMPGHWLVTGAKLDVDKGKIALRVKYSLLHY

SEQ ID NO: 1211 - protein, 617 aa, Huperzia squarrosa
MVWAGDQEMVQKEPDRMASQATAREALQALGRGFDVTLDLRLAYCKGPPGSCLIELDEEEKSDILIPGGAAIIPDVSRDIKCDNGERTHFSSEVLPFEQMSERFNQALSISGKMPLGLFNTMYSLNGTWQSDASATKALAVDGWFISLYNMQISKTPQSLKEEVIKAVPPFWEPAALASFIEKYGTHIIMSVKIGGKDVVYIRQYQSSPLSPGEIKRYLKEIADQRFAEGSEQFMSNVRSNEKSPIPLTSTSHAHRLQMANAYTSASFTTKGDVEVILRRRGGDCMVKHHSDWLATVPFSPDVIAMSFIPITALLNGVPGSGFLSHAINLYLRYKPPIEELRLFLEFQIPRQWSPGFDLPFGCQRKEPVYPSLQFSLMGPKLYVSTAQVTVGRRPVTGLRLCLEGKKGNRLAIHLQHLSNLPKILQPHWDQHLPIGLPVWKEPEEQDSKWFEPVQWKSFSHVSTAPIEYRRESYVGETSAVYIVTGAQLRVWDFGLKNVLFLRLLFLKVPGCSVKRSIWDHAPQASQKSGLFSQFGLSTNFTSAHKAKPAPVVLNSAVFPEGPPAPAQNLKLLKFVDVKEMTKGAHDTPGHWLVTGARLDADRGKIALRVKYALLLY

SEQ ID NO: 1212 - protein, 617 aa, Huperzia nummarifolia
MVWAGDQEMAQTEPDRMAAQAIAREALQALGRGFDVTLDLRLAYCKGPPGSCLIELDEEEKSDILIPGGAAIIPDVSRDIKCDKGERTHFSSEVLPFEQMSERFNQALCISGKMPLGLFNSMYNLNGTWQSDASATKALAVDGWFMSLYNMQISKTPQNLKEEVKKAVPPFWEPAALARFIEKYGTHIIMSVKIGGKDVVYIRQYQSSTLSPGEIKKYLKEIADQRFAEGSGHDISNMQSKEKSSDPLTSTNHAHRLQMANTHTSASFTAKGDVEVIFRRRGGDCTVKHHSDWLATVPSSPDVMAMTFIPITSLLNEVPGSGFLSHAINLYLRYKPPIEELQFFLEFQIPRQWSPGFDLPIVPQRKEPVCPSLQFSLMGPKIYVSTNQVTVGRRPVTGLRLFLEGKKGNRLAIHLQHLSSLPKILQPHWDQHIPIGLPVWKEPEEQDSKWFEPVQWKSFSHVSTAPIEYLKESYVGETSAVYIVTGAQLRVWDFGLKNVLFLRLLFLKVPGCSVKRTIWDHSPESSQKSGLFSQLAVSKTFSSAHKAKPAPVVLNSAVLPEGPHVPVQSLKFLKFVDVKEMMKGAQDMPGHWLVTGAKLDVDRGKIALRVKYSLLHY

SEQ ID NO: 1213 - protein, 570 aa, Huperzia nummulariifolia (Blume)
MRERGIIEFDEEANLDLVIPGGAAIIPNVSRDIRCEKGERKHFRSDVLPFHQMAERFNDALNISGKVPSGFFNSVFSLNGTWQSDASAIKALAVDCWVISLYNMQISKTPQNLKEEVKKAVPPFWEPAALARFIEKYGTHIIMSVKIGGRDVVYIKQYQSSTLSPEEIKRYLREIADQRFAEGSGQGISNMQSKEKSSDPLTSANHAHRLQMANTHTSTSFTAKGDVEVIFRRRGGDCTVKHHSDWLDTVPSSPDVVEMTFIPITSLLNGVPGSGFLSHAIKLYLRYKPPIEELQFFLEFQIPRQWSPGFDLPLVPQRKEPVCPSLQFSLMGPKVYVSTNQVTVGRRPVTGLRLSLEGKKGNRLAIHLQHLSNLPKILQPHWDQHIPIGLPVWKEPEEQDSKWFEPVQWKSFSHVSTAPIEYLKESYVGETSAVYIVTGAQLRVWDFGLKNVLFLRLLFLKVPGCSVKRTVWDHSPESSQKSGLLSQLGLSTTFSSASKAKPAPVVLNSAVFPEGPPVPVQNLKFLKFVDVKEMMKGAQDMPGHWLVTGAKLDVDKGKIALRVKYSLLHY

SEQ ID NO: 1214 - protein, 613 aa, Huperzia nummulariifolia (Blume)
MVWAGDQEMAQTDSDRMAAQATAREALQALGRGFDVTLDLRLAYCKGPSGSRIIEFDEEANLDLVIPGGAAIIPNVSRDIRCEKGERKHFRSDVLPFHQMAERFNDALNISGKVPSGFFNSVFSLNGTWQSDASAIKALAVDCWVISLYNMQISKTPQNLKEEVKKAVPPFWEPAALARFIEKYGTHIIMSVKIGGRDVVYIKQYQSSTLSPEEIKRYLREIADQRFAEGSGQGISNMQSKEKSSDPLTSANHAHRLQMANTHTSTSFTAKGDVEVIFRRRGGDCTVKHHSDWLDTVPSSPDVVEMTFIPITSLLNGVPGSGFLSHAIKLYLRYKPPIEELQFFLEFQIPRQWSPGFDLPLVPQRKEPVCPSLQFSLMGPKVYVSTNQVTVGRRPVTGLRLSLEGKKGNRLAIHLQHLSNLPKILQPHWDQHIPIGLPVWKEPEEQDSKWFEPVQWKSFSHVSTAPIEYGKEDDLIANIVTGAQLQVWDLGAKKVLFLRLLFSKVPGCSIKTSFWDHTPQSSQKSGLFSQLGLSTNFTSARKAKPAAVILNSAIFPEGPPAAVQKLKLLKFVDVKEMSKGAQDVPGHWLVTGAKLDVDKGKIALRLKYSLLHY

SEQ ID NO: 1215 - protein, 613 aa, Huperzia carriata (Philippines)
MGIDWAGDQMAYREAERTIAQSTAIEALQCLGRGFDVTLDLRLAYCKGPSGSLLVELSEETYPEIVLPGGVVITNVSKDIKCDKGERTHFRSEVLTFHQMSTRFNEALSITGKMPLGLFNTMFSFNGTWQGDASETKALALDGWFITLYNMQITKPELSLNEEVKKAVPSSWEPAALARFIEKYGTHIIVSVKLGGKDVVYLKQYESSLLSSGEVQKYLKVIADQRFSEEAGQNISDTHLKVIADQRFSEEAGQNISDTHLKDKLPDPLTSTNHAHRLQMASNFTSSSLTTIKDVEVIVRRRGGDSLVKRHNDWLATVSSAPDVVSMSFVAISSLLNGVPGSGFLSHAVNLYLRYKPPIEELQFFLEFQIPKQWSPGFDLPLGPQRKGPVCPAMQFSLMGPKLYVCTTQVTVGRRPVTGLRLFLEGKKGNRLTIHLQHLSNLPKILQPHWDQHIAIGPPIWKEPEEQDSKWFEPVQWKSFSHVSTAPIEYLQESYIGETSAVYIVTGAQLRVWDFGLKNVLFLRLLFLKVPGCSVKRTVWDHSPESSQKSGLFSQLAVSKTFSSAHKAKPAPVVLNSAVLPEGPHVPVQSLKFLKFVDVKEMIKGAITTIVFS

SEQ ID NO: 1216 - protein, 428 aa, Huperzia nummulariifolia (Blume)
MVWAGDQEMAQTDSDRMAAQATAREALQALGRGFDVTLDLRLAYCKGPPGSCLIELDEEEKSDILIPGGAAIIPDVSRDIKCDKGERTHFSSEVLPFEQMSERFNQALSIPGKVPLGLFNTMFSLNGTWLSDASATKALAVDGWFISLYNMQISKIPLHLKEEVQKAVPPCWEPAALASFIEKYGTHIIMSVKIGGKDVVYIRQYQSSPLSPGEIKRYLKEIAGQRFAEGSEQVMLNMRSNEESPIPLTSHAHRLQMANAYTSASFTTKGDVEVILRRRGGDCMVKHHSDWLATVPFSPDVIAMSFIPITALLNGVPGSGFLSHAIKLYLRYKPPIEELQFFLEFQIPRQWSPGFDLPLVPQRKEPVCPSLQFSLMGPKVYVSTNQVTVGRRPVTGLRLSLEGKKGNRLAIHLQHLSNLPKILQPPLC

SEQ ID NO: 1217 - protein, 348 aa, Huperzia phlegmoides
MVWAGDQEMAQTDSDRMAAQATAREALQALGRGFDVTLDLRLAYCKGPPGSCLIELDEEEKSDILIPGGAAIIPDVSRDIKCDKGERTHFSSEVLPFEQMSERFNQALSVPGKVPLGLFNTMFSLNGTWQSDASATKALAVDGWFISLYNMQISKIPLRLKEEVKKAVPPCWEPAALASFIEKYGTHIIMSVKIGGKDVVYIRQYQSSPLSPGEIKRYLKEIADQRFAEGSEQFMLNMRSNEKSPIPLTSTSHAHRLQMANAYTSTSFTTKGDVEVIFRRRGGDCTVKHHSDWLATVPSSPDVVAMTFIPITSLLNEVPGSGLLSHAINLYLRYKPPIEELQLTLSSI

SEQ ID NO: 1218 - protein, 617 aa, Huperzia nummulariifolia
MVWAGDQEMAQTEPDRMAAQAIAREALQALGRGFDVTLDLRLAYCKGPSGSHIIEFDEEANLDLVIPGGAAIIPNVSGDIRCEKGERTHFRSDVLPFHEMAERFNDALNISGKVPLGFFNTMFSLNGTWQSDASATKALAVDGWFMSLYNMQISKTPQNLKEEVKKAVPPFWEPAALARFIEKYGTHIIMSVKIGGKDVVYIRQYQSSTLSPGEIKKYLKEIADQRFAEGSGHDISNMQSKEKSSDPLTSTNHAHRLQMANTHTSASFTAKGDVEVIFRRRGGDCTVKHHSDWLATVPSSPDVMAMTFIPITSLLNEVPGSGFLSHAINLYLRYKPPIEELQFFLEFQIPRQWSPGFDLPLVPQRKEPVCPSLQFSLMGPKIYVSTNQVTVGRRPVTGLRLFLEGKKGNRLAIHLQHLSNLPKILQPHWDQHIPIGLPVWKEPEEQDSKWFEPVQWKSFSHVSTAPIEYLKESYVGETSAVYIVTGAQLRVWDFGLKNVLFLRLLFLKVPGCSVKRTIWDHSPESSQKSGLFSQLAVSKTFSSAHKAKPAPVVLNSAVLPEGPHVPVQSLKFLKFVDVKEMMKGAQDMPGHWLVTGAKLDVDKGKIALRLKYSLLHY

SEQ ID NO: 1219 - protein, 615 aa, Huperzia salvinioides
MVWAGDQEMAQTDSDRMAAQATAREALQALGRGFDVTLDLRLAYCKGPSGSRIIEFDEEANLDLVIPGGAAIIPNVSRDIRCEKGERKHFRSDVLPFHQMAERFNEALNISGKVPLGLFNTMFSLNGTWLSDASATKALAVDGWFISLYNMQISKIPLHLKEEVQKAVPPCWEPAALASFIEKYGTHIIMSVKIGGKDVVYIRQYQSSPLSPGEIKRYLKEIAGQRFAEGSEQVMLNMRSNEESPIPLTSHAHRLQMANAYTSASFTTKGDVEVILRRRGGDCMVKHHSDWLATVPFSPDVIAMSFIPITALLNGVPGSGFLSHAIKLYLRYKPPIEELQFFLEFQIPRQWSPGFDLPLVPQRKEPVCPSLQFSLMGPKVYVSTNQVTVGRRPVTGLRLSLEGKKGNRLAIHLQHLSNLPKILQPHWDQHIPIGLPVWKEPEEQDSKWFEPVQWKSFSHVSTAPIEYLKESYVGETSAVYIVTGAQLRVWDFGLKNVLFLRLLFLKVPGCSVKRTVWDHSPESSQKSGLLSQLGLSTTFSSASKAKPAPVVLNSAVFPEGPPVPVQNLKFLKFVDVKEMSKGAQDVPGHWLVTGAKLDVDKGKIALRLKYSLLHY

SEQ ID NO: 1220 - protein, 344 aa, Platycerium bifurcatum
MVCAGDQEMAQTDSDRMAAQATAREALQALGRGFDVTLDLRLAYCKGPSGSRIIEFDEKSNLDLVIPGGAAIIPNVSGDIRCEKGERKHFRSDVLPFHEMAERFNDALNISGKVPLGFFNTMFSLNGTWQSDASATKALAVDGWFMSLYNMQISKTPQNLKEEVKKAVPPFWEPAALARFIEKYGTHIIMSVKIGGKDVVYIRQYQSSTLSPGEIKKYLKEIADQRFAEGSGHDISNMQSKEKSSDPLTSTNHAHRLQMANTHTSASFTAKGDVEVIFRRRGGDCTVKHHSDWLATVPSSPDVMAMTFIPITSLLNEVPGSGFLSHAINLYLRYKPPIEELQFF

SEQ ID NO: 1221 - protein, 503 aa, Platycerium bifurcatum
MARGNQMHFSLNGTWQSDASATKALAVEGWFISLYNMQISKIPLRLKEEVKKAVPPCWEPAALASFIEKYGTHIITSVKIGGKDVVYIRQYQSSPLSPGEIKSYLKEIADQRFAEGSEQFMLNMRSNEKSPIPLTSTSHAHRLQMANAYTSASFTTKGDVEVILRRRGGDCMVKHHSDWLATVPFSPDVIAMSFIPITALLNGVPGSGFLSHAINLYLRYKPPIEELQFFLEFQIPRQWSPGFDLPIVPQRKEPVCPSLQFSLMGPKIYVSTNQVTVGRRPVTGLRLFLEGKKGNRLAIHLQHLSNLPKILQPHWDQHIPIGLPVWKEPEEQDSKWFEPVQWKSFSHVSTAPIEYLKESYVGETSAVYIVTGAQLRVWDFGLKNVLFLRLLFLKVPGCSVKRTVWDHSPESSQKSGLFSQLGLSTTFSSASKARPAPVVLNSTVFPEGPPVPVQNLKFLKFVDVKEMMKGAQDMPGHWLVTGAKLDVDKGKIALRVKYSLLHY

SEQ ID NO: 1222 - protein, 617 aa, Huperzia phlegmaria
MVWAGDQEMVQNEPDRMAAQATAREALQALGRGFDVTLDLRLAYCKGPSGSRIIEFDEEANLDLVIPGGAAIIPNVSRDIRCEKGERKHFRSDVLPFHQMAERFNEALSISGKVPLGLFNTVFSLNGTWQSDASAIKALAVDCWVISLYNMQISRTPKNLKEEVKKAVPPFWEPAALARFIEKYGTHIIMSVKIGGKDVVYLRQYQSSTLSPGEIKKYLKEIADQRFAEGSGHDISNMQSKEKSSDPLTSTNHAHRLQMANAHTSASFTAKGDVEVIFRRRGGDCTVKHHSDWLDTVPSSPDVVEMTFIPITSLLNEVPGSGFLSHAIKLYLRYKPPIEELQFFLEFQIPRQWSPGFDLPIVPQRKEPVCPSLQFSLMGPKVYVSTNQVTVGRRPVTGLRLFLEGKKGNRLAIHLQHLSNLPKILQLHWDQHIPIGLPVWKEPEEQDSKWFEPVQWKSFSHVSTAPIEYLKESYVGETSAVYIVTGAQLRVWDFGLKNVLFLRLLFLKVPGCSVKRTVWDHSPESSQKSGLFSQLGLSTTFSSASKAKPAPVVLNSAVFPEGPPVPVQNHKFLKFVDVKEMMKGAQDMPGHWLVTGAKLDVDKGKIALRVKYSLLHY

SEQ ID NO: 1223 - protein, 628 aa, Huperzia phlegmaria
MKERIYHYSSHMGIDWAGDQMAYREAERTIAQSTAIEALQCLGRGFDVTLDLRLAYCKGPSGSLLVELSEETYPEIVLPGGVVITNVSKDIKCDKGERTHFRSEVLTFHQMSTRFNEALSITGKMPLGLFNTMFSFNGTWQGDASETKALALDGWFITLYNMQITKPELSLNEEVKKAVPSSWEPAALARFIEKYGTHIIVSVKLGGKDVVYLKQYESSLLSSAEVQKYLKVTADQRFSEEAGLNISDTHLKDKLPDPLTSTNHAHRVPTASNFTSSSFTTIKDVEVILRRRGGDSLVKRHNDWLATVSSAPDVVSMSFVAISSLLNGVPGSGFLSHAVNLYLRYKPPIEELQFFLEFQIPKQWSPGFDLPLGPQRKGPVCPALQFSLMGPKLYVCTTQVTVGRRPVTGLRLFLEGKKGNRLTIHLQHLSNLPKILQPHWDQHIAIGPPIWKEPEEQDSKWFEPVQWKSFSHVSTAPIEYLKESYVGETSAVYIVTGAQLRVWDFGLKNVLFLRLLFLKVPGCSVKRTIWDHSPESSQKSGLFSQLAVSNTFSSARKAKPAPVVLNSAVLPEGPHVPVQSLKFLKFVDVKEMMKGAQDMPGHWLVTGAKLDVDKGKIALRVKYSLLHY

SEQ ID NO: 1224 - protein, 651 aa, Huperzia nummarifolia
MVWAGDQEMAQTEPDRMAAQAIAREALQALGRGFDVTLDLRLAYCKGPSGSRIIEFDEKSNLDLVIPGGAAIIPNVSGDIRCEKGERKHFRSDVLPFHQMAERFNEALNISGKVPLGFFNTMFSLNGTWQSDASATKALAVDCWVISLYNMQIFKTPKNLKEEVKKAVPPFWEPADGWFMSLYNMQISKTPQNLKEEVKKAVPPFWEPAALARFIEKYGTHIIMSVKIGGKDVVYIRQYQSSTLSPGEIKKYLKEIADQRFAEGSGHDISNMQSKEKSSDPLTSTNHAHRLQMANTHTSASFTAKGDVEVIFRRRGGDCTVKHHSDWLATVPSSPDVMAMTFIPITSLLNEVPGSGFLSHAINLYLRYKPPIEELQFFLEFQIPRQWSPGFDLPIVPQRKEPVCPSLQFSLMGPKIYVSTNQVTVGRRPVTGLRLFLEGKKGNRLAIHLQHLSSLPKILQPHWDQHIPIGLPVWKEPEEQDSKWFEPVQWKSFSHVSTAPIEYLKESYVGETSAVYIVTGAQLRVWDFGLKNVLFLRLLFLKVPGCSVKRTIWDHSPESSQKSGLFSQLAVSKTFSSAHKAKPAPVVLNSAVLPEGPHVPVQSLKFLKFVDVKEMMKGAQDMPGHWLVTGAKLDVDRGKIALRVKYSLLHY

SEQ ID NO: 1225 - protein, 577 aa, Huperzia tetratoides
MSQGLAYCKGPPGSCLIELDEEEKSEILIPGGAAIIPDVSRDIKCDKGERTHFSSEVLPFEQMSERFNQALSISGKVPLGLFNTMFSLNGTWQSDASATKALAVDGWFISLYNMQISKTPQSLKEEVIKAVPPFWEPAALASFIEKYGTHIIMSVKIGGKDVVYIRQYQSSPLSPGEIKRYLKEIADQRFAEGSEQFMSNTRSNEKSPIPLTSTSHAHRLQMANAYTSASFTTKGDVEVIFRRRGGDCMVKHHSDWLATVPSSPDVIAMTFIPITSLLNEVPGSGFLSHAISLYLQYKPPIEELQFFLEFQISRQWSPGFDLPLVPQRKEPVCPSLQFSLMGPKLYVSTAQVTVGRRPVTGLRLCLEGKKGNRLAIHLQHLSNLPKILQPHWDQHIPIGLPVWKEPEEQDSKWFEPVQWKSFSHVSTAPIEYREESYVGETSAVYIVTGAQLRVWDFGLKNVLFLRLLFLKVPGCSVKRTVWDHSPESSQKSSLFPQLGLSTTFSSACKAKPAPVESNSTVFTEGDVKSLKFLKFVDIKEMTKGAQDMPGHWLVTGAKLDVDKGKIALRVKYSLLHY

SEQ ID NO: 1226 - protein, 616 aa, Huperzia nummulariifolia (Blume)
MVWAGDQEMAQTDSDRMAAQATAREALQALGRGFDVTLDLRLAYCKGPSGSRIIEFDEEANLDLVIPGGAAIIPNVSRDIRCEKGERKHFRSDVLPFHQMAERFNDALNISGKVPSGFFNSVFSLNGTWQSDASAIKALAVDCWVISLYNMQISKTPQNLKEEVKKAVPPFWEPAALARFIEKYGTHIIMSVKIGGRDVVYIKQYQSSTLSPEEIKRYLREIADQRFAEGSGQGISNMQSKEKSSDPLTSANHAHRLQMANTHTSTSFTAKGDVEVIFRRRGGDCTVKHHSDWLDTVPSSPDVVEMTFIPITSLLNGVPGSGFLSHAIKLYLRYKPPIEELQFFLEFQIPRQWSPGFDLPLVPQRKEPVCPSLQFSLMGPKVYVSTNQVTVGRRPVTGLRLSLEGKKGNRLAIHLQHLSNLPKILQPHWDQHIPIGLPVWKEPEEQDSKWFEPVQWKSFSHVSTAPLEYLVESYVGEINSTYIVTGAQLRVWDFGIKNVLFLRLLFCRVPGCSIKRSFWDHTPQTSQKSNLFSQLGLSSISSARKAKPVPIVLNSAVYPDDPPTSTQTNKLLKFVDIKEMTKGAQDKPGHWLVTGAKLDVDGGKIALGVKYSLLHY

SEQ ID NO: 1227 - protein, 665 aa, Huperzia carriata (Philippines)
MGIDWAGDQMAYREAERTIAQSTAIEALQCLGRGFDVTLDLRLAYCKGPSGSLLVELSEETYPEIVLPGGVVITNVSKDIKCDKGERTHFRSEVLTFHQMSTRFNEALSITGKMPLGLFNTMFSFNGTWQGDASETKALALDGWFITLYNMQITKPELSLNEEVKKAVPSSWEPAALARFIEKYGTHIIVSVKLGGKDVVYLKQYESSLLSSGEVQKYLKVIADQRFSEEAGQNISDTHLKDKLPDPLTSTNHAHRLQMASNFTSSSLTTIKDVEVIVRRRGGDSLVKRHNDWLATVSSAPDVVSMSFVAISSLLNGVPGSGFLSHAVNLYLRYKPPIEELQFFLEFQIPKQWSPGFDLPLGPQRKGPVCPAMQFSLMGPKLYVCTTQVTVGRRPVTGLRLFLEGKKGNRLTIHLQHLSNLPKILQPHWDQHIAIGPPIWKEPEEQDSKWFEPVQWKSFSHVSTAPIEYLQESYIGETSAVYIVTGAQLRVWDFGLKNVLFLRLLFLKVPGCSVKRTVWDHSPESSQKSGLFSQLAVSKTFSSAHKAKPAPVVLKKVPGCSVKRTIWDHSPESSQKSGLFSQLAVSKTFSSAHKAKPAPVVLNSAVLPEGPHVPVQSLKFLKFVDVKEMMKGAQDMPGHWLVTGAKLDVDKGKIALRVKYSLLHY

SEQ ID NO: 1228 - protein, 431 aa, Huperzia phlegmoides
MVWAGDQEMAQTDSDRMAAQATAREALQALGRGFDVTLDLRLAYCKGPSGSHIIEFDEEANLDLVIPGGAAIIPNVSRDIRCEKGERKHFRSDVLPFHQMAERFNEALNIYGKVPLGLFNTMFSFNGTWQSDASATKALAVDCWVISLYNMQISKTPKNLKEEVKKAVPPFWEPAALARFIEKYGTHIIMSVKIGGKDVVYLRQYQSSTLSPEEIKRYLREIADQRFAEGSGHDISNMQSKDQSSTLSPEEIKRYLREIADQRFAEGSGQGISNMQSKEKSSDPLTSTNHAHRLQMANTHTSASFTAKGDVEVIFRRRGGDCTVKHHSDWLATVPSSPDVVAMTFIPITSLLNEVPGSGLLSHAINLYLRYKPVKHHSDWLATVPSSPDVVAMTFIPITSLLNEVPGSGLLSHAINLYLRYKPPIDDISLL

SEQ ID NO: 1229 - protein, 503 aa, Huperzia nummulariifolia
MPLGLFNTMFSFNGTWQGDASETKALALDGWFITLYNMQITKPELSLNEEVKKAVPSSWEPAALARFIEKYGTHIIVSVKLGGKDVVYLKQYESSLLSSGEVQKYLKVIADQRFSEEAGQNISDTHLKDKLPDPLTSTNHAHRLQMASNFTSSSFTTIKDVELIVRRRGGDSLVKRHNDWLATVSSAPDVVSMSFVAISSLLNGVPGSGFLSHAVNLYLRYKPPIEELQFFLEFQIPKQWSPGFDLPLGPQRKGPVCPAMQFSLMGPKLYVCTTQVTVGRRPVTGLRLFLEGKKGNRLTIHLQHLSNLPKILQPHWDQHIAIGPPIWKEPEEQDSKWFEPVQWKSFSHVSTAPLEYLVESYVGEINSTYIVTGAQLRVWDFGIKNVLFLRLLFCRVPGCSIKRSFWDHTPQASQKSNLFSQLGLSSISSARKAKPVPIVLNSAVFPDDPPQSTQTHKLLKFVDIKEMTKGAQDKPGHWLVTGAKLDVDGGKIALGVKYSLLHY

SEQ ID NO: 1230 - protein, 339 aa, Huperzia nummulariifolia (Blume)
MVWAGDQEMAQTDSDRMAAQATAREALQALGRGFDVTLDLRLAYCKGPPGSCLIELDEEEKSDILIPGGAAIIPDVSRDIKCDKGERTHFSSEVLPFEQMSERFNQALSIPGKVPLGLFNTMFSLNGTWLSDASATKALAVDGWFISLYNMQISKIPLHLKEEVQKAVPPCWEPAALASFIEKYGTHIIMSVKIGGKDVVYIRQYQSSPLSPGEIKRYLKEIAGQRFAEGSEQVMLNMRSNEESPIPLTSHAHRLQMANAYTSASFTTKGDVEVILRRRGGDCMVKHHSDWLATVPFSPDVIAMSFIPITALLNGVPGSGFLSHAIKLYLRYKPPIEEL

SEQ ID NO: 1231 - protein, 617 aa, Huperzia nummarifolia
MVWAGDQEMVQNEPDRMAAQAIAREALQALGRGFDVTLDLRLAYCKGPPGSCLIELDEEEKSDILIPGGAAIIPDVSRDIKCDKGERTHFSSEVLPFEQMSERFNQALCISGKMPLGLFNTMFSFNGTWQGDASETKALALDGWFITLYNMQITKPELSLNEEVKKAVPSSWEPAALARFIEKYGTHIIVSVKLGGKDVVYLKQYESSLLSSGEVQKYLKVIADQRFSEEAGQNISDTHLKDKLPDPLTSTNHAHRLQMANTHTSASFTAKGDVEVIFRRRGGDCTVKHHSDWLATVPSSPDVMAMTFIPITSLLNEVPGSGFLSHAINLYLRYKPPIEELQFFLEFQIPRQWSPGFDLPIVPQRKEPVCPSLQFSLMGPKIYVSTNQVTVGRRPVTGLRLFLEGKKGNRLAIHLQHLSSLPKILQPHWDQHIPIGLPVWKEPEEQDSKWFEPVQWKSFSHVSTAPIEYLKESYVGETSAVYIVTGAQLRVWDFGLKNVLFLRLLFLKVPGCSVKRTIWDHSPESSQKSGLFSQLAVSKTFSSAHKAKPAPVVLNSAVLPEGPHVPVQSLKFLKFVDVKEMMKGAQDMPGHWLVTGAKLDVDRGKIALRVKYSLLHY

SEQ ID NO: 1232 - protein, 615 aa, Huperzia nummulariifolia (Blume)
MVWAGDQEMAQTDSDRMAAQATAREALQALGRGFDVTLDLRLAYCKGPPGSCLIELDEEEKSDILIPGGAAIIPDVSRDIKCDKGERTHFSSEVLPFEQMSERFNQALSIPGKVPLGLFNTMFSLNGTWLSDASATKALAVDGWFISLYNMQISKIPLHLKEEVQKAVPPCWEPAALASFIEKYGTHIIMSVKIGGKDVVYIRQYQSSPLSPGEIKRYLKEIAGQRFAEGSEQVMLNMRSNEESPIPLTSHAHRLQMANAYTSASFTTKGDVEVILRRRGGDCMVKHHSDWLATVPFSPDVIAMSFIPITALLNGVPGSGFLSHAIKLYLRYKPPIEELQFFLEFQIPRQWSPGFDLPLVPQRKEPVCPSLQFSLMGPKVYVSTNQVTVGRRPVTGLRLSLEGKKGNRLAIHLQHLSNLPKILQPHWDQHIPIGLPVWKEPEEQDSKWFEPVQWKSFSHVSTAPIEYLKESYVGETSAVYIVTGAQLRVWDFGLKNVLFLRLLFLKVPGCSVKRTVWDHSPESSQKSGLLSQLGLSTTFSSASKAKPAPVVLNSAVFPEGPPVPVQNLKFLKFVDVKEMMKGAQDMPGHWLVTGAKLDVDKGKIALRVKYSLLHY

SEQ ID NO: 1233 - protein, 613 aa, Huperzia nummulariifolia
MVWAGHQQMAQKEPGKFVAEVTAREAVQAIGRGFDVTLDLRLAYCKGPAGSRLIELDEEKNVDMVIPGGGFVLQGVSRDIRCDKGERTRFRSEVLSFHHMSERFNQALCISGKMPLGLFNSMYNLNGTWQSDASATKSLALDGWFISLYNLQLRKASLTLKEEVKEAVPSVWEPAALARFIDKYGTHIIESVKVGGKDVVYTRQYQSSPLTPGDIQKYLKELADQRFAEGSGQNNVNMRAKEKSLDPFAVTNHAHRLQLASTNTSSSFTAKGDVEVNYKRRGGDNLVRFHGDWLATVPLSPDVISMSFVPITSLLNGVPGSGFLSHAINLYLRYKPPIEELRSFLEFQIPRQWCPGFDLPLGPQRKEPACPSLQFSFMGPKLYINTAQVIVGRRPVTGLQLFLEGKKGNRLAIHLQHLSNLPKILQPHWGQHIAVGPPVWKQPEELDTKWFEPVQWKSFSHVSTAPIEYGKEDDNIANIVTGAQLQVWDLGAKKVLFLRLLFSKVPGCSIKTSFWDHTPQSSQKSGLFSQLGLSTNFTSARKAKPAAVILNSAIFPEGPPAAVQKLKLLKFVDVKEMTKGAHDTPGHWLVTGARLDADRGKIALRVKYALLLY

SEQ ID NO: 1234 - protein, 617 aa, Huperzia carriata (Solomon Islands)
MVWAGDQEMAQIEPDRMAAQATAREALQALGRGFDVTLDLRLAYCKGPSGSRIIEFDEEANLDLVIPGGAAIIPNVSGDIRCEKGERTHFISDVLPFHQMAERFNDALNISGKVPLGFFNTVFSLNGTWQSDASTTKALAVDGWFMSLYNMQISKTPKNLKEEVKKAVPPFWEPAALARFIEKYGTHIIMSVKIGGKDAVYLRQYQSSTLSPGEIKKYLKEIADQRFAEGSGQGISNMQSKEKSSDPLTSTNHAHRLQMANTHTSASFTAKGDVEVIFRRRGGDCTVKHHSDWLATVPSSPDVMSMTFIPITSLLNDVPGSGFLSHAINLYLRYKPPIEELQFFLEFQIPRQWSPGFDLPIVPQRKEPVCPSLQFSLMGPKVYVSTNQVTVGRRPVTGLRLFLEGKKGNRLAIHLQHLSNLPKILQPHWDQHLPIGLPVWKEPEEQDSKWFEHVQWKSFSHVSTAPIEYRRESYVGETSAVYIVTGAQLRVWDFGLKNVLFLRLLFLKVPGCSVKRSVWDHTPQASQKSGLFSQFGLSTNFTSAHKAKPAPVVLNSAVFPEGPPAPAQNLKLLKFVDVKEMSKGAQDVPGHWLVTGAKLDVDKGKIALRVKYSLLHY

SEQ ID NO: 1235 - protein, 617 aa, Huperzia nummulariifolia
MVWAGDQEMAQTEPDRMAAQAIAREALQALGRGFDVTLDLRLAYCKGPSGSHIIEFDEEANLDLVIPGGAAIIPNVSGDIRCEKGERTHFRSDVLPFHEMAERFNDALNISGKVPLGFFNTMFSLNGTWQSDASATKALAVDGWFMSLYNMQISKTPQNLKEEVKKAVPPFWEPAALARFIEKYGTHIIMSVKIGGKDVVYIRQYQSSTLSPGEIKKYLKEIADQRFAEGSGHDISNMQSKEKSSDPLTSTNHAHRLQMANTHTSASFTAKGDVEVIFRRRGGDCTVKHHSDWLATVPSSPDVMAMTFIPITSLLNEVPGSGFLSHAINLYLRYKPPIEELQFFLEFQIPRQWSPGFDLPLVPQRKEPVCPSLQFSLMGPKIYVSTNQVTVGRRPVTGLRLFLEGKKGNRLAIHLQHLSNLPKILQPHWDQHIPIGLPVWKEPEEQDSKWFEPVQWKSFSHVSTAPIEYLKESYVGETSAVYIVTGAQLRVWDFGLKNVLFLRLLFLKVPGCSVKRTIWDHSPESSQKSGLFSQLAVSKTFSSAHKAKPAPVVLNSAVLPEGPHVPVQSLKFLKFVDVKEMMKGAQDMPGHWLVTGAKLDVDKGKIALRVKYSLLHY

SEQ ID NO: 1236 - protein, 338 aa, Huperzia nummarifolia
MVWAGDQEMAQTEPDRMAAQAIAREALQALGRGFDVTLDLRLAYCKGPSGSRIIEFDEKSNLDLVIPGGAAIIPNVSGDIRCEKGERKHFRSDVLPFHQMAERFNEALNISGKVPLGFFNTMFSLNGTWQSDASATKALAVDGWFMSLYNMQISKTPQNLKEEVKKAVPPFWEPAALARFIEKYGTHIIMSVKIGGKDVVYIRQYQSSTLSPGEIKKYLKEIADQRFAEGSGHDISNMQSKEKSSDPLTSTNHAHRLQMANTHTSASFTAKGDVEVIFRRRGGDCTVKHHSDWLATVPSSPDVMAMTFIPITSLLNEVPGSGFLSHAITAVLLGISDS

SEQ ID NO: 1237 - protein, 355 aa, Huperzia phlegmoides
MVWAGDQEMAQTDSDRMAAQATAREALQALGRGFDVTLDLRLAYCKGPSGSHIIEFDEEANLDLVIPGGAAIIPNVSRDIRCEKGERKHFRSDVLPFHQMAERFNEALNIYGKVPLGLFNTMFSFNGTWQSDASATKALAVDCWVISLYNMQISKTPKNLKEEVKKAVPPFWEPAALARFIEKYGTHIIMSVKIGGKDVVYLRQYQSSTLSPEEIKRYLREIAASTLSPEEIKRYLREIADQRFAEGSGQGISNMQSKEKSSDPLTSTNHAHRLQMANTHTSASFTAKGDVEVIFRRRGGDCTVKHHSDWLATVPSSPDVVAMTFIPITSLLNEVPGSGLLSHAINLYLRYKPPI

SEQ ID NO: 1238 - protein, 616 aa, Huperzia nummarifolia
MVWAGDQEMAQTEPDRMAAQAIAREALQALGRGFDVTLDLRLAYCKGPSGSRIIEFDEKSNLDLVIPGGAAIIPNVSGDIRCEKGERKHFRSDVLPFHQMAERFNEALNISGKVPLGFFNTMFSLNGTWQSDASATKALAVDGWFMSLYNMQISKTPQNLKEEVKKAVPPFWEPAALARFIEKYGTHIIMSVKIGGKDVVYIRQYQSSTLSPGEIKKYLKEIADQRFAEGSGHDISNMQSKEKSSDPLTSTNHAHRLQMANTHTSASFTAKGDVEVIFRRRGGDCTVKHHSDWLATVPSSPDVMAMTFIPITSLLNEVPGSGFLSHAINLYLRYKPPIEELQFFLEFQIPRQWSPGFDLPIVPQRKEPVCPSLQFSLMGPKIYVSTNQVTVGRRPVTGLRLFLEGKKGNRLAIHLQHLSSLPKILQPHWDQHIPIGLPVWKEPEEQDSKWFEPVQWKSFSHVSTAPLEYLVESYVGEINSTYIVTGAQLRVWDFGIKNVLFLRLLFCRVPGCSIKRSFWDHTPQASQKSNLFSQLGLSSISSARKAKPVPIVLNSAVFPDDPPQSTQTHKLLKFVDIKEMTKGAQDKPGHWLVTGAKLDVDGGKIALGVKYSLLHY

SEQ ID NO: 1239 - protein, 616 aa, Huperzia carriata (Philippines)
MGIDWAGDQMAYREAERTIAQSTAIEALQCLGRGFDVTLDLRLAYCKGPSGSLLVELSEETYPEIVLPGGVVITNVSKDIKCDKGERTHFRSEVLTFHQMSTRFNEALSITGKMPLGLFNTMFSFNGTWQGDASETKALALDGWFITLYNMQITKPELSLNEEVKKAVPSSWEPAALARFIEKYGTHIIVSVKLGGKDVVYLKQYESSLLSSGEVQKYLKVIADQRFSEEAGQNISDTHLKDKLPDPLTSTNHAHRLQMASNFTSSSLTTIKDVEVIVRRRGGDSLVKRHNDWLATVSSAPDVVSMSFVAISSLLNGVPGSGFLSHAVNLYLRYKPPIEELQFFLEFQIPKQWSPGFDLPLGPQRKGPVCPAMQFSLMGPKLYVCTTQVTVGRRPVTGLRLFLEGKKGNRLTIHLQHLSNLPKILQPHWDQHIAIGPPIWKEPEEQDSKWFEPVQWKSFSHVSTAPLEYLVESYVGEINSTYIVTGAQLRVWDFGIKNVLFLRLLFCRVPGCSIKRSFWDHTPQASQKSNLFSQLGLSSISSARKAKPVPIVLNSAVFPDDPPQSTQTHKLLKFVDIKEMTKGAQDKPGHWLVTGAKLDVDGGKIALGVKYSLLHY

SEQ ID NO: 1240 - protein, 616 aa, Huperzia salvinioides
MGIDWAGDQMAYREAERTIAQSTAIEALQCLGRGFDVTLDLRLAYCKGPSGSLLVELSEETYPEIVLPGGAVITNVSKDIKCDKGERTHFRSEVLTFHQMSTRFNEALSITGKMPLGLFNTMFSFNGTWQGDASETKALALDGWFITLYNMQITKPELSLNEEVKKAVPSSWEPAALARFIEKYGTHIIVSVKLGGKDVVYLKQYESSLLSSGEVQKYLKVTADQRFSEEAGQNIADTHLKDKLPDPLTSANHAHRLQTASNITSSSFTTIKDVEVILRRRGGDSLVKRHNDWLATVSSAPDVVSMSFVAISSLLNGVPGSGFLSHAVNLYLRYKPPIEELQFFLEFQIPKQWSPGFDLPLGPQRKGPVCPALQFSLMGPKLYVCTTQVTVGRRPVTGLRLFLEGKKANRLTIHLQHLSNLPKILQPHWDQHIAIGPPIWKEPEEQDSKWFEPVQWKSFSHVSTAPLEYLVESYVGEINSTYIVTGAQLRVWDFGIKNVLFLRLLFCRVPGCSIKRSFWDHTPQTSQKSNLFSQLGLSSMSSARKAKPVPIVLNSAVYPDDPPTSTQTNKLLKFVDIKEMTKGAQDKPGHWLVTGAKLDVDGGKIALGVKYSLLHY

SEQ ID NO: 1241 - protein, 399 aa, Huperzia carriata (Philippines)
MAQTDSDRMAAQATAREALQALGRGFDVTLDLRLAYCKGPSGSRIIEFDEEANLDLVVPGGAAIIPNVSGDIRCEKGERTHFISDVLPFHQMAERFNDALNISGKVPLGFFNTVFSLNGTWQSDASTTKALAVDGWFMSLYNMQISKTPQNLKEEVKKAVPPFWEPAALAQSDALATKALAVDGWFMSLYNMQISKTPQNLKEEVKKAVPPFWEPAALARFIEKYGTHIIMSVKIGGKDVVYLRQYQSSTLSPGEIKKYLKEIADQRFAEGSGQGISNMQSKEKSSDPVTSANHAHRLQMANTHTSTSFKAKGDVEVIFRRKGGDCTVKHHSDWLATVPSSPDVMSMTFIPITSLLNEVPGSGFLSHAINLYLRYKPPIEELQLFLEFQIPRQWSPGFD

SEQ ID NO: 1242 - protein, 617 aa, Platycerium bifurcatum
MVWAGDQEMAQTEPDRMAAQAIAREALQALGRGFDVTLDLRLAYCKGPSGSRIIEFDEKSNLDLVIPGGAAIIPNVSGDIRCEKGERKHFRSDVLPFHEMAERFNDALNISGKVPLGFFNTMFSLNGTWQSDASATKALAVDGWFMSLYNMQISKTPQNLKEEVKKAVPPFWEPAALARFIEKYGTHIIMSVKIGGKDVVYIRQYQSSTLSPGEIKKYLKEIADQRFAEGSGHDISNMQSKEKSSDPLTSTNHAHRLQMANTHTSASFTAKGDVEVIFRRRGGDCTVKHHSDWLATVPSSPDVMAMTFIPITSLLNEVPGSGFLSHAINLYLRYKPPIEELQFFLEFQIPRLWSPGFDLPLVPQRKEPVCPSLQFSLMGPKIYVSTNQVTVGRRPVTGLRLFLEGKKGNRLAIHLQHLSNLPKILQPHWDQHIPIGLPVWKEPEEQDSKWFEPVQWKSFSHVSTAPIEYLKESYVGETSAVYIVTGAQLRVWDFGLKNVLFLRLLFLKVPGCSVKRTIWDHSPESSQKSGLFSQLAVSKTFSSAHKAKPAPVVLNSAVLPEGPHVPVQSLKFLKFVDVKEMMKGAQDMPGHWLVTGAKLDVDKGKIALRLKYSLLHY

SEQ ID NO: 1243 - protein, 650 aa, Huperzia nummarifolia
MVWAGDQEMVQNEPDRMAAQAIAREALQALGRGFDVTLDLRLAYCKGPSGSRIIEFDEKSNLDLVIPGGAAIIPNVSGDIRCEKGERKHFRSDVLPFHQMAERFNEALNISGKVPLGFFNTMFSLNGTWQSDASATKALAVDCWVISLYNMQIFKTPKNLKEEVKKAVPPFWEPADGWFMSLYNMQISKTPQNLKEEVKKAVPPFWEPAALARFIEKYGTHIIMSVKIGGKDVVYIRQYQSSTLSPGEIKKYLKEIADQRFAEGSGHDISNMQSKEKSSDPLTSTNHAHRLQMANTHTSASFTAKGDVEVIFRRRGGDCTVKHHSDWLATVPSSPDVMAMTFIPITSLLNEVPGSGFLSHAINLYLRYKPPIEELQFFLEFQIPRQWSPGFDLPIVPQRKEPVCPSLQFSLMGPKIYVSTNQVTVGRRPVTGLRLFLEGKKGNRLAIHLQHLSSLPKILQPHWDQHIPIGLPVWKEPEEQDSKWFEPVQWKSFSHVSTAPLEYLVESYVGEINSTYIVTGAQLRVWDFGIKNVLFLRLLFCRVPGCSIKRSFWDHTPQASQKSNLFSQLGLSSISSARKAKPVPIVLNSAVFPDDPPQSTQTHKLLKFVDIKEMTKGAQDKPGHWLVTGAKLDVDGGKIALGVKYSLLHY

SEQ ID NO: 1244 - protein, 620 aa, Huperzia nummarifolia
MGIDWAGDQMAYREAERTIAQSTAIEALQCLGRGFDVTLDLRLAYCKGPSGSLLVELSEETYPEIVLPGGVVITNVSKDIKCDKGERTHFRSEVLTFHQMSTRFNEALSITGKMPLGLFNTMFSFNGTWQGDASETKALALDGWFITLYNMQITKPELSLNEEVKKAVPSSWEPAALARFIEKYGTHIIVSVKLGGKDVVYLKQYESSLLSSGEVQKYLKVIADQRFSEEAGQNISDTHLKDKLPDPLTSTNHAHRLQMASNFTSSSFTTIKDVELIVRRRGGDSLVKRHNDWLATVSSAPDVVSMSFVAISSLLNGVPGSGFLSHAVNLYLRYKPPIEELQFFLEFQIPKQWSPGFDLPLGPQRKGPVCPAMQFSLMGPKLYVCTTQVTVGRRPVTGLRLFLEGKKGNRLTIHLQHLSNLPKILQPHWDQHIAIGPPIWKEPEEQDSKWFEPVQWKSFWKSFSHVSTAPLEYLVESYVGEINSTYIVTGAQLRVWDFGIKNVLFLRLLFCRVPGCSIKRSFWDHTPQASQKSNLFSQLGLSSISSARKAKPVPIVLNSAVFPDDPPQSTQTHKLLKFVDIKEMTKGAQDKPGHWLVTGAKLDVDGGKIALGVKYSLLHY

SEQ ID NO: 1245 - protein, 447 aa, Huperzia carriata (Philippines)
MQISKIPLRLKEEVKKAVPPCWEPAALASFIEKYGTHIITSVKIGGKDVVYIRQYQSSPLSPGEIKRYLTEIADQRFAEGSEQFMSNMRSNEKSPIPLTSTSHAHRLQMANTYTSASFTTKGDVEVIFRRRGGDCTVKHHSDWLATVPSSPDVMSMTFIPITSLLNEVPGSGFLSHAINLYLRYKPPIEELQLFLEFQIPRQWSPGFDLPLVPQRKEPVCPSLQFSLMGPKVYVSTNQVTVGRRPVTGLRLSLEGKKGNRLAIHLQHLSNLPKILQPHWDQHIPIGLPVWKEPEEQDSKWFEPVQWKSFSHVSTAPIEYLQESYIGETSAVYIVTGAQLRVWDFGLKNVLFLRLLFLKVPGCSVKRTVWDHSPESSQKSGLFSQLAVSKTFSSAHKAKPAPVVLNSAVLPEGPHVPVQSLKFLKFVDVKEMIKGAITTIVFSVLFLL

SEQ ID NO: 1246 - protein, 264 aa, Huperzia phlegmoides
MVWAGDQEMAQTDSDRMAAQATAREALQALGRGFDVTLDLRLAYCKGPSGSHIIEFDEEANLDLVIPGGAAIIPNVSGDIRCEKGERTHFISDVLPFHEMAERFNDALNISGKVPLGLFNTMFSFNGTWQSDASATKALAVDCWVISLYNMQISKTPKNLKEEVKKAVPPFWEPAALARFIEKYGTHIIMSVKIGGKDVVYLRQYQSSTLSPEEIKRYLREIADQRFAEGSGQGISNMQSKEKDVEVIFRRRGGDCTVKHHSDW

SEQ ID NO: 1247 - protein, 365 aa, Huperzia carinata
MVWARDQEMAQTDSDRMAAQATAREALQALGRGFDVTLDLRLAYCKGPSGSHLIEFDEEANLDLVIPGGAAIIPNVSRDIRCEKGERKHFRSDVLPFHQMAERFNEALNISGKVPLGLFNTMFSFNGTWQSDASATKALAVDCWVISLYNMQISKTPKNLKEEVKKAVPPFWEPAALARFIEKYGTHIIMSVKIGGRDVVYIKQYQSSTLSPEEIKRYLREIADQRFAEGSGQGISNMQSKEKSSDPVSKEKSSDPLTSTNHAHRLQMANTHTSASFTAKGDVEVIFRRRGGDCTVKHHSDWLATVPSSPDVVEMTFIPITSLLNEVPGSGFLSHAIKLYLRYKPPIEELQFFLEFQIPRVVSRF

SEQ ID NO: 1248 - protein, 617 aa, Huperzia carriata (Solomon Islands)
MVWAGDQEMAQIEPDRMAAQATAREALQALGRGFDVTLDLRLAYCKGPSGSRIIEFDEEANLDLVIPGGAAIIPNVSGDIRCEKGERTHFISDVLPFHQMAERFNDALNISGKVPLGFFNTVFSLNGTWQSDASTTKALAVDGWFMSLYNMQISKTPKNLKEEVKKAVPPFWEPAALARFIEKYGTHIIMSVKIGGKDAVYLRQYQSSTLSPGEIKKYLKEIADQRFAEGSGQGISNMQSKEKSSDPLTSTNHAHRLQMASNFTSSSFTTIKDVELIVRRRGGDSLVKRHNDWLATVSSAPDVVSMSFVAISSLLNGVPGSGFLSHAVNLYLRYKPPIEELQFFLEFQIPKQWSPGFDLPIVPQRKEPVCPSLQFSLMGPKVYVSTNQVTVGRRPVTGLRLFLEGKKGNRLAIHLQHLSNLPKILQPHWDQHLPIGLPVWKEPEEQDSKWFEPVQWKSFSHVSTAPIEYLKESYVGETSAVYIVTGAQLRVWDFGLKNVLFLRLLFLKVPGCSVKRTVWDHSPESSQKSGLFSQLGLSTTFSSASKAKPAPVVLNSAVFPEGPPVPVQNLKFLKFVDVKEMMKGAQDMPGHWLVTGAKLDVDKGKIALRVKYSLLHY

SEQ ID NO: 1249 - DNA, 25 bp, artificial sequence
  cloning primer
gattaccatatggcccaaatagagc

SEQ ID NO: 1250 - DNA, 26 bp, artificial sequence
  cloning primer
gctaactcgagctagtctaaatgacg

SEQ ID NO: 1251 - DNA, 48 bp, Artificial Sequence
  cloning primer
gctgcagggatcgagggaagggaacccaacaaaggtggtgctccagcc

SEQ ID NO: 1252 - DNA, 45 bp, Artificial Sequence
  cloning primer
cgggctttgttagcagccggatctactccaaatggcgtgatttgc

SEQ ID NO: 1253 - DNA, 37 bp, Artificial Sequence
  cloning primer
gctgcagggatcgagggaagggaggactccaaagctc

SEQ ID NO: 1254 - DNA, 44 bp, Artificial Sequence
  cloning primer
cgggctttgttagcagccggattcagacaaactcgacagcatcc

SEQ ID NO: 1255 - DNA, 28 bp, Artificial Sequence
  cloning primer
cagataaccatatggcccaaatagagcc

SEQ ID NO: 1256 - DNA, 30 bp, Artificial Sequence
  cloning primer
gctaagaattcctagtctaaatgacgtgag

SEQ ID NO: 1257 - DNA, 29 bp, Artificial Sequence
  cloning primer
aacatatggcccgtatcgagccattacct

SEQ ID NO: 1258 - DNA, 38 bp, Artificial Sequence
  cloning primer
aactcgagctagtctaaatgaggtgagaaacgaacgaa

SEQ ID NO: 1259 - DNA, 28 bp, Artificial Sequence
  cloning primer
ctggttcgaatatcagattacgccatgg

SEQ ID NO: 1260 - DNA, 28 bp, Artificial Sequence
  cloning primer
ctgcttgaaacatcagattaggccatgg

SEQ ID NO: 1261 - DNA, 24 bp, Artificial Sequence
  cloning primer
ttctgaacatcagtagtagtagta

SEQ ID NO: 1262 - DNA, 26 bp, Artificial Sequence
  cloning primer
tgctgctgcaaactaattacagctag

SEQ ID NO: 1263 - DNA, 28 bp, Artificial Sequence
  cloning primer
gcccgttctagttctaatataaatattc

SEQ ID NO: 1264 - DNA, 23 bp, Artificial Sequence
  cloning primer
atggaacccaacaaaggtggtgc

SEQ ID NO: 1265 - DNA, 23 bp, Artificial Sequence
  cloning primer
ctactccaaatggcgtgatttgc

SEQ ID NO: 1266 - DNA, 25 bp, Artificial Sequence
  cloning primer
catcaagcaatcaagctctcaatgg

SEQ ID NO: 1267 - DNA, 24 bp, Artificial Sequence
  cloning primer
tgatcgccttatcacgcattctac

SEQ ID NO: 1268 - DNA, 68 bp, Artificial Sequence
  cloning primer
gccaaagaagctgccgcaaaggcggctgcagggatcgagggaaggatggcccaaatagagccattacc

SEQ ID NO: 1269 - DNA, 68 bp, Artificial Sequence
  cloning primer
gccaaagaagctgccgcaaaggcggctgcagggatcgagggaaggatggcccaaatcaagccactacc

SEQ ID NO: 1270 - DNA, 68 bp, Artificial Sequence
  cloning primer
gccaaagaagctgccgcaaaggcggctgcagggatcgagggaaggatggtgaatatcgagccattacc

SEQ ID NO: 1271 - DNA, 54 bp, Artificial Sequence
  cloning primer
aagcttgtcgacggagctcgaattcggatccctagtctaaatgacgtgagaaac

SEQ ID NO: 1272 - DNA, 67 bp, Artificial Sequence
  cloning primer
gccaaagaagctgccgcaaaggcggctgcagggatcgagggaaggatggaacccaacaaaggtggtg

SEQ ID NO: 1273 - DNA, 68 bp, Artificial Sequence
  cloning primer
gccaaagaagctgccgcaaaggcggctgcagggatcgagggaaggatggaacccaagacaggtggtgc

SEQ ID NO: 1274 - DNA, 54 bp, Artificial Sequence
  cloning primer
aagcttgtcgacggagctcgaattcggatccctactccaaatggcgtgatttgc

SEQ ID NO: 1275 - DNA, 1458 bp, Artificial Sequence
  encodes IPD079Ea/IPD079Aa chimera
atggaacccaacaaaggtggtgctccagccatgaaaaatgtagccaaaccttccacaaagagactcataccgtcatccattgctgcatcatcgcaaacatctgcaaatgcattaaccgagccattgcctggctctgatgccatcggccagagctacgatgcattcgggttcttcgccaatcccagaagcatcatgaaggagttgttcgagttcagtcctcaagaggagatagtcgtggaaggaaatacctggcttctctcttcggacttcgtttacaccgcaattagagacactgagacctccacggtctcacgtcgcaccaaggacgactactccaaggaattggctgtgaaggtgaagctgtctggaagctatggctatttttctgcctccgttgagtctgatttctctcagagcatttccgatgcgacggacaccacatacacttcagttcgcacccacgtcaacaagtggaggctgagcctgaaggacgatgttggggcccttcgctcgaagctgctgcctggcgtcaagcaggcgctggctaccatggatgctacgcagctctttgacacgttcgggactcactatgtgagcgaggtgcttgtgggtgggcgtgcagactacgttgccaccaccaagaccagcgcgttcagctcatccaccagcatcagcgtagcggcagaagcatcattccagtccatcgcgggtggggaggtgtctccggagtccaaggtgcttgcggagatgctgagagagaacagcagcacacgcctgtacgctcttggcgggagtgccctccccaacatcacagatccagccacgtacaacgcctggctggagtccattgacaccatccctgtcttctgcggattcactcaaaacagcctcaagtccatctcggagcttgctgactccgctcaacgccgggacgctctggccaaagcctcccaaagctatatcccatcatacgtgactcgtcctgcagtggttggcttggaggtcataatatcggacagcaactcggagagccctccctatggctacaccagaatagactatgatctgaaccgcaatgccaagggcaaatatatctttttgtgctacaatcaacagaagatatcagtagcaggatcccctgcggatccgacgcccatcactgccttgtacgtggcttctggcgatgacgatcatccatacgttcctctaggttataccaggatcaacagcgatctgaacgagggtgcggggggcaaatatatctatctatgctacacaaaagatccggctgcaatacccagcgacgaggatggactgcccatacgtggcatccgcgttattggtaatgaaaaagtcgagaatgtggttacaccttacggattcacgaagattgataaagatctgaacgagggtgcaggaggagactatatcttcgtttgtttctcacgtcatttagac

SEQ ID NO: 1276 - protein, 486 aa, Artificial Sequence
  IPD079Ea/IPD079Aa chimera
MEPNKGGAPAMKNVAKPSTKRLIPSSIAASSQTSANALTEPLPGSDAIGQSYDAFGFFANPRSIMKELFEFSPQEEIVVEGNTWLLSSDFVYTAIRDTETSTVSRRTKDDYSKELAVKVKLSGSYGYFSASVESDFSQSISDATDTTYTSVRTHVNKWRLSLKDDVGALRSKLLPGVKQALATMDATQLFDTFGTHYVSEVLVGGRADYVATTKTSAFSSSTSISVAAEASFQSIAGGEVSPESKVLAEMLRENSSTRLYALGGSALPNITDPATYNAWLESIDTIPVFCGFTQNSLKSISELADSAQRRDALAKASQSYIPSYVTRPAVVGLEVIISDSNSESPPYGYTRIDYDLNRNAKGKYIFLCYNQQKISVAGSPADPTPITALYVASGDDDHPYVPLGYTRINSDLNEGAGGKYIYLCYTKDPAAIPSDEDGLPIRGIRVIGNEKVENVVTPYGFTKIDKDLNEGAGGDYIFVCFSRHLD

SEQ ID NO: 1277 - protein, 443 aa, Artificial Sequence
  IPD079Aa/IPD079Ea chimera
MAQIEPLPGSDAIGLSYDVFGFYANPKSVNRQLFDFAPQQEITLEDHTWLLSTDIVYIAVRDTDINTVSLRTKDAYSTELAASVKVSGSYGSFSASVESDFSQSISDETDSTYTSVRTHVNKWRLSLKDDVGALRSKLLPGVKQALATMDATQLFDTFGTHYVSEVLVGGRADYVATTKTSAFSSSTSISVAAEASFQSIAGGEVSPESKVLAEMLRENSSTRLYALGGSALPNITDPATYNAWLESIDTIPVFCGFTQNSLKSISELADSAQRRDALAKASQSYIPSYVTRPAVVGLEVIISDSNSESPPYGYTRIDYDLNRNAGGKYVFLCYKQKNISVGGDADAITDVLVVYGNDRNPSVPSGYTKIDKDLNSGAGGKYIYFCYSKDKRKQEEGLPIRGLRVVGPHPTSVAPYGFSKIDIDLNMGAGGDFIYLCKSRHLE

SEQ ID NO: 1278 - protein, 486 aa, Artificial Sequence
  IPD079Aa/IPD079Ea
MEPNKGGAPAMKNVAKPSTKRLIPSSIAASSQTSANALTEPLPGSDAIGQSYDAFGFFANPRSIMKELFEFSPQEEIVVEGNTWLLSSDFVYTAIRDTETSTVSRRTKDDYSKELAVKVKLSGSYGYFSASVESDFSQSISDATDTTYTSVRTHVNKWRLSLKDDVGALRSKLLPGVKQALATMDATQLFDTFGTHYVSEVLVGGRADYVATTKTSAFSSSTSISVAAEASFQSIAGGEVSPESKVLAEMLRENSSTRLYALGGSALPNITDPATYNAWLESIDTIPVFCGFTYESLQPIWELAESPQRQEILQKATKTFIPPEIRRNAIVDVDIIVSDNYWVNPPYGYTKIDYDLNRNAKGKYIFLCYNQQKISVAGSPADPTPITALYVASGDDDHPYVPLGYTRINSDLNEGAGGKYIYLCYTKDPAAIPSDEDGLPIRGIRVIGNEKVENVVTPYGFTKIDKDLNEGAGGDYIFVCFSRHLD

SEQ ID NO: 1279 - DNA, 3829 bp, Diabrotica virgifera
gaaatttggcaggtagattccttgctaataatgcgataagtattgtatagagttataactgagcctaatcattgtgttttaaaaactatcatgttaactaagtttgaaacgaaatccgcccgggtaaaagggctgtcttttcaccctaaacgtccctggatcttaactagtcttcacaatggttgtatccaattatgggactaccgtatgtgcaccctcctagagaaatttgatgagcatgatggccctgtaagaggcatttgcttccacaatcaacagcccttatttgtttctggtggtgatgattacaagatcaaagtatggaattacaaacaaaaacgatgcatttttactctattgggtcatttagattatattcgtacaacattgttccaccatgaatatccatggatagtttccgcatctgatgatcaaactatcaggatctggaattggcagagcagaacttgcatttgtgttttaactggacacaatcactatgttatgtgtgtaagttttcatccttctgaagatttgctggtgtcagcttcattggattccactgtcagagtttgggacatttcaggcttaagaaagaaaaatgtagctccaggtccagcaggactagaggaacatttgaagaatccaggagcaactgatctttttggtcaagcagatgcagttgtaaaacatgtgttagagggtcatgatagaggtgtaaactgggcatctttccatccaactctgcctcttattgcctctggtgctgatgacagacaagtaaaattatggagaatgaatgattctaaagcatgggaagttgatacatgccgaggccactggcataatgtttcttgtgttttattccatcctagacaggaactgattctctcaaacagtgaagataaaactattagagtttgggatacaactaaaagaacttgcctacatacatttaaaagggaaaatgaaagattctggataatggcatcacatccaaacctcaacttgtttgctgctggacatgatggtggaatggttatattcaagcttgagcgtgaacgtccagcttacacagtacatggcaacctcctgtattatgttaaagaacgttacttacgaaaacttgattttaccacatctaaagatgttccagtcattcagattcgtggtggaggaaaaataccagtttataagatgtcctttaatccagctgaaaatgctgttcttctttctacaagaacttcaaacttggataatagcacatacgatttatatgtgattccaaaagagcaggagagagatgatcaagtaccagaagctgaaagcaaaaggtcttctggacttacggcattatgggttgcaagaaacagatttgccgttttggacaggactcatcaactaattatcaagaacttgaaaaacgaagtcaccaagaaggtacaaactcctacatgtgatgaagtattttatgctggtactggaatgctgttattaagagattctgaacatgttactctgtttgacgttcaacagaagagaactttagcacaagtgaaaattaacaaatgcagatacgttgtctggtcgtctgatatgtcccacttggctctcctttccaaacacaacgtgactatttgtaataggaaattggatgttttatgttgtttacacgaaaatactagagtgaaatctggagcttgggatgatacaggagtttttatttatactacaagcaaccatttgaaatatacacttaaaaacggtgaccaaggaattattagaaccctcgatcttccaatatacatcaccagagtaagaggaaaccagatcttttgccttgatcgtgaatgcaaaccacgggtattgacagtggattcaatggaatacaaattcaaacttgcattaattaatcacaaatatgaagaagttttgtatatggttagaaattcaaaattggtgggacaatctatgatttcttacttacaacaaaaaggttatcctgaagtagccttacattttgtaaaagacgacaaaactcgatttactttggctctggaatgtggaaatattgagattgctctagatgctgcgaaatctttgaatgacaaagcttgttgggatcaactagcacatgctgctctatggcaaggaaaccatcaagtagttgagatgtgttatcaaaggaccaagagtttcgaaaaattatcattcctatatctgattaccggcaacctggacaaattgagaaaaatgatgaaaattgcggaaattagaaaagctaaatcatctcaatatcatgctgcacttttgcttggtgatcttgaagagcgtgttaaaattttgaaggcttccaatcaactttctttggcctacttgacagctgctactcacggaatggtagatgaagctgaacagctgaaggaacaaattggagaaaagaaaggttttccagatgtagatccaaatgcaaaatttttgaagccacctcctccaattcaacaagcagaatccaattggcctttgttgacagttagtaggggctttttcgaaaatacggccgcagttgctacagcttctgctaacatgaaatctcttatggcggaacctgtggccgatatgggaatggaagaggcaccaggttggggagacgacgacgaactggagctggatccagaagagaagaaagctgaagctgctgcaggtggtggtgatggggaaggaggctgggacgttgaagatgaaggattggaaatacctgatttaggtccatcggttcctgttgaagcggagggcaattttgttcatttgcctacgcaaggtccatccccactggttacatggaccaaaaattcgcagttagttgccgaccacatcgctgccggttcatttgaatcagctgcgagattgcttcatgatcagttaggagtagtcgattttaaaccatacgaaagcttatttattagtttgtatagcagttccagaacagtttattcttggcagcaaaatataccgccatcatttagctatccgttgagaaattggaaggatgccaatgttaagaaccagttgcctgcttctggcgtgaaattgaatgaactagtcgccaaattacaggcttgctatcaactcactacaggaggcaaattcacggaagccatagaaaaatttcaaactcttcttctctcagtaacgttagtagtagtagagaataaacaagaaatatcggaagcacaacagttgttgaggatatgtagtgaatacatttgtggtcttcagatggaaactttaagaaaaactttaccaaaagcttcacatgaagaacaaaaacgtcaatgcgagatggcggcttacttcacacattgtaaacttcagcctatacatcaaattttaacactcaggactgctctaaatatgttctttaagctaaaaaattacaaaacagcagcatcatttgctaaaagacttcttgagctcggcccaagacctgaagtagctcaacaagctagaaagatcattcaagcctgtgataccaatctgaccgatgaattacagatgcagtatgatgaacataatcctttcaacctgtgtggtcattcgtatacaccgatttatagaggaaaagccgaagaaaagtgtccgttgtgtggaacttcttacttacctaaatataagggaacattgtgcaatgtttgccgggtagctgaagttggaaaggattgtattggactcagaataagtgtacatcaatttagataggttaaatgcattttgtatttggaaatgattaagtattgatatatttgagatcttattctcaggttagaga

SEQ ID NO: 1280 - DNA, 2792 bp, Diabrotica virgifera
caagtgcttttcaaaatctggatttgacgtttattttggtcgtcggctgatgtgacgtgtaaagaaattaaatcaaattattttaaagtttttaaattaaaatgggtacttttaaaagagatactcatgatgaggacgggggatcaagtgcttttcaaaatctggagaaaactactgttttgcaggaagctagagtttttaatgaaactagtgtaaatccaagaaaatgtacaccgatactaacaaaactgttgtacttattgaaccagggtgaaactttaagtgccaaagaggccacagatgttttctttgccatgaccaaactgttccaatcaaaagatgtaatattgagaaggatggtttatttgggaattaaagaactcagttctgttgctgatgatgtcattattgtaacatccagtcttacaaaagatatgactggtaaagaagacatgtacagagcagctgctataagagcattatgcagtattactgatgctactatgcttcaagctatagaacgttatatgaagcaagctattgtagatagaaacgcagctgtcagttcagcagcactaattagttcattacatatgagcaaattagctccagatgtagtaaaaagatgggtaaatgaagctcaggaagcagtaaatagtgataatgcaatggtacagtatcacgcattaggtcttctataccatattaggaagactgataagctagcagtgacaaaattgatttccaagctgaattcaatgggtttaaagagcccttatgctttgtgtatgttgataagaatcactgcaaaacttttagaagaagaggaccaagagtcactcctcaactccccatatacaataatatttacaatgggcttaaggaacaaatctgaaatggtggtgtatgaagctgcacatgccatggttaacctgaagttcacgagtagtaatgtgctagcacccgctataagtgttctacaactattttgtggatctcctaaagccacactcagatttgctgctgttagaactttaaatcaagtggccaccacccaccctgcgtcagtgacagcttgtaatttggatctagaaaatttgattactgatcctaataggtcaattgctacactggccattactactcttttgaaaacaggtgccgaatcttctgttgacagactaatgaaacaaatcgctacttttgtatctgaaatcagtgatgaatttaaagtggttgtcattcaggcaattaaggtattagctttgaaatttccaaggaaacatagcacgcttatgaatttcctatccgccatgttaagagatgagggaggtttagaatataaagcatccatagcagataccattataaccctaatcgaagataatcccgaagctaaagaatctggtttggcgcatctttgcgagttcattgaagactgtgaacatgtttctttggctgtgagaatcttgcatttgttaggaaaggaaggacccaagaccaaacaaccatcgagatacatccgttttatctacaatcgcgtcatattggaatgtccttctgtaagagctgctgcagtctccgccatggcacaattcggagcctcttgtcccgatttgttagaaaatatccaaatattactttcgaggtgtcagatggattcagacgatgaagttagggacagagctacatattatagtaatatacttaacaaaaatgataaaagtttatacaacaattacattttggattctttgcaggtttcaattccttcactagaaagatcgcttagagaatacattcaaaatccaactgacgaaccatttgacattaagtccgtacctgtagcagcagtgccaacagcagaagaacgagaagttaaaaacaaatctgaaggactgctagtctctcaaggtccagtccgacctcctccggtgtctagagaagaaaacttcgccgaaaaacttagtaacgttccgggtatacaacagttaggacctttgttcaaaacttccgacgtcgttgaactcactgaatctgaaacagagtattttgtccgctgtatcaagcactgtttcaaacatcacatcgtcctccaattcgattgtctgaataccttgccagaccagcttttagaaaacgttagagtggagatagacgccggtgaaaccttcgaaattttggcagaaataccttgtgaaaagttgcactataacgaaaccggtaccacatatgtagtagttaagttgcctgatgatgatctccccaactctgttggtacgtgtggagccgtgttgaagttcttagtgaaagattgtgatccatcaacgggaataccagattctgatgagggttacgatgatgaatatacactggaagacatcgaaataacattaggggaccaaattcaaaaagtaagcaaagtaaattgggctgcagcctgggaagaagctgcagctacttatgtagaaaaagaggatacatactccttgaccatcaatacgctaagtggcgctgttaagaatattattcagttcttgggattacagcctgcggaaaggactgacagagtaccggagggtaaatctacgcacacattacttcttgctggtgtattcaggggaggtattgacatactagtaagagcgaaactagctttgggcgaatgtgttacgatgcaactaacagtcaggtcgccagatcctgacgttgctgagcttataacttcaactgtaggttaagtttaaaggctacgttaatgattatattgtattacaatttttccatatgta

SEQ ID NO: 1281 - DNA, 924 bp, Diabrotica virgifera
tttttttatctgaaatttacatttattaaatatttattaataattctatacaaaataatacaatcaagctggaatggtagaaactgaaggggaatattgctggcaaatcctgtgaaaatcattttcttttatcttcagatcacgaatgtatggatgatcaggatttgcatccttcaactgagacagatatctattagcaatctcaggtgctttggccatatgtctctgaagggtgatcatgttaacaagtgtatcaggatagttggcatccttatcaagtgcttcttgaagagctgcttcggcttcctcatatttggcttggccaatgaaagtcactgcttgtccgtttagcaacaatggagtggatccatatttgtctacaagttcttggtaaatatagtaggcgtcctggagtttatctccaccagtggatacattaatccaagcttgagccagttgtgttaaagttgcatcatcgtccttatcttgcatctctttcagcttcttccttgccaaatctactctatccaatttcaaaagtatatctataataaaggccattgcttcgaggctttctgtagcgtgcaaaactttatacgcagcatcaagattgccttcgttaacataaatagtagctgctaccaaaattagagtatcattgttagcatttgcttggacttgttgctccacttgagccaccacagaatccttcttgattttgcctgctaagtagtcagcgaggtatttcaggggttggatttctgggggagatgccccgtggatttcgtctaatactactaggaatttattttgggccatataggaccggtaggtgtagaagtctctttggactgctacttcgggcgtagacggctttcggagtttttgtgcctcgtttatcagggattattaattaataattat

SEQ ID NO: 1282 - DNA, 742 bp, Diabrotica virgifera
tcagctgttctttggcagattgaaacacctataaataaatttatttgttcaattattaaaatataattcgtacacaaatacaaaaatactgctatctttacaactacggtaatgtataactttaactttttgacactacttttacaggatatacttatcctaccaaaacaaagaatgtatcgcagtagttacctgggctactgtctgttccccgatttgaagatcatcgtttcggagagctattctagagattactgaattcgagtctgcccccatcattatcccttcatcacaaatttcatccacagctaacattacaatatctaattgatctaaaagtgccttcctttccatatttttctttaagatctggttaattgtgtcgtataaacaatttaaaacactcacaagcataagctcattttcttgggaacttcctataacataaaaaagcagttcaacattactcttataaacacatgttaagccatttacattgataatttcaccgcctacttccttgtaggttttattaaataaggttttctcaaatgcactttgttctttggatgtgataaatagatttttgtcatagtatttggccaatactctctcaccaatacaatccattattaaaataccttttacagtatataaggttggttcccattgcattccttccatgtccgagcctatcttaattatttatatagatggatttatatcaaaaaataaaaaaaaa

SEQ ID NO: 1283 - DNA, 684 bp, Diabrotica virgifera
aacaacacaacagattttattaagttgtagacgtgtaatttttgtaaatttattctaagccattattaattaaagtaatactaaaatggaaggaatactactggaaccaacattgtataccataaaaggtattgctatattggactatgatggtaatagagtgctggctaaatactacgataaagatatatttcctacagcaaaagagcagaaagcttttgagaaaaatttgttcaataaaactcatagggcagacgcagaaattatcatgttggatggtttaacttgtgtgtatagaagtaatgtagatttattcttttatgttatgggcagttcacatgaaaatgagctaattttaatgagtgttttaaattgcttgtatgactcagtaagtcaaatattgaagaaaaatatgcaaaaacgagctgtcttggaatcactagatattgttatgctggctatggatgaaattgttgatggaggaataattatagattctgattcaagttcagtagtatctagaatagcattaaggactgatgatattccattaggagaacaaactgtagctcaggtattccaaacggccaaagaacagctgaaatggtcattgctgaaataaagtgcgtattttaaaacaaggtaatcggtatttatttcatgtacaatttaattattaagtgg

SEQ ID NO: 1284 - DNA, 3756 bp, Diabrotica barberi
tgttttaaaaactatcatgttaaccaagtttgaaactaaatccgcccgggtaaaagggctgtcttttcaccctaaacgtccctggatcttaactagtcttcacaatggttgtatccaattatgggactaccgtatgtgcaccctcttagagaaatttgatgagcatgatggccctgtaagaggcatttgcttccacaatcaacagcccttatttgtttctggtggtgatgattacaagatcaaagtatggaattacaaacaaaaacgatgcatttttactctattgggccatttagattacattcgtacaacattgttccaccatgaatatccatggatagtttccgcatctgatgatcaaactatcaggatctggaattggcagagcagaacttgcatttgtgttttaaccggacacaatcactatgttatgtgtgtaagttttcatccttctgaagatttgctggtgtcagcttcattggattccactgtcagagtttgggacatttcaggcttaagaaagaaaaatgtagctccaggtccagcaggactagaagaacacttgaaaaatccaggagcaactgatctttttggtcaagcagatgcagttgtaaaacatgtgttagagggtcatgatcgaggtgtaaactgggcatctttccatccaactctgcctcttattgcctctggtgctgatgacagacaagtaaaattatggagaatgaatgattctaaagcatgggaagttgatacatgccgaggccactggcataatgtttcttgtgttttattccatcctagacaggaactgattctctcaaacagtgaagataaaactattagagtttgggatacaactaaaagaacttgcctacatacatttaaaagggaaaatgaaagattctggataatggcatcacatccaaacctcaacttgtttgctgctggacatgatggtggaatggttatattcaaacttgagcgtgaacgtccagcttacacagtacatggcaacctcctgtactatgttaaagaacgttatttacgaaaacttgattttaccacatctaaagatgttccagtcattcagattcgtggtggaggaaaaataccagtttataagatgtcctttaatccagctgaaaatgctgttcttctttccacaagaacttcaaacttggataacagtacatatgatttatatgtgattccaaaagagcaggagagagatgatcaagtaccagaagctgaaagcaaaaggtcttctggacttacggccttatgggttgcaagaaatagatttgcagttttggaccggactcatcaattaattatcaagaacttgaaaaacgaagttaccaagaaggtgcaaactcctacatgtgatgaagtattttatgctggtactggaatgctgttattaagagattctgaacatgttactctgtttgatgttcaacagaagagaactttagctcaagtaaaaattaacaaatgcagatacgttgtctggtcgtctgatatgtcccacttggctctcctttccaaacacaacgtgactatttgtaataggaaattggatgttttatgttgtttacacgaaaatactagagtgaaatctggagcttgggatgatacaggagtttttatttatactacaagcaaccatttgaaatatacacttaaaaacggtgaccaaggaattattagaaccctcgatcttccaatatacatcaccagagtaagaggaaaccagatattttgccttgatcgtgaatgcaaaccacgggtattgacagtggattcaatggaatacaaattcaaacttgcattaattaatcacaaatatgaagaagttttgtatatggttagaaattcaaaattggttggacaatctatgatttcttacttacaacaaaaaggttatcctgaagtagccttacattttgtaaaagacgacaaaactcgatttactttggctctggaatgtggaaatattgagattgctctggaagctgcgaaatctttgaatgacaaagcttgttgggatcaactggcacatgctgctctatggcaaggaaaccatcaagtagttgagatgtgttatcaaaggaccaagagtttcgaaaaattatcattcctatatctgattaccggcaacctggacaaattgagaaaaatgatgaaaattgcggaaattagaaaagctaaatcatctcaatatcatgctgcacttttgcttggtgatcttgaagagcgtgttaaaattttgaaggcttcaaatcaactttctttggcctacttgacagctgctactcacggaatggtagatgaagctgaacagctgaaggaacaaattggagaaaagaaaggttttccagatgtagatccaaatgccaaatttttgaagccacctcctccaattcaacaagcagaatccaactggcctttgttgacagttagtaggggctttttcgaaaatacggccgcagttgctacagcttctgctaacatgaaatctcttatggcggaacctgtggctgatatgggaatggaagaggcaccaggttggggagacgacgacgaactggagctggatccagaagagaagaaagctgaagcttctgcaggtggtggtgatggggaaggaggctgggacgttgaagatgaaggattggaaatacctgatttaggtccatcggttcctgttgaagcggagggcaattttgttcatttgcctacgcaaggcccatccccactggttacatggaccaaaaattcgcagttagttgccgaccacattgctgccggttcatttgaatcagctgcgagattgcttcatgatcaattaggagtagtcgattttaaaccatacgaaagcttatttattagtttgtatagcagttccagaacagtttattcttggcagcaaaatataccgccgtcatttagctatccgttaagaaattggaaggatgccaatgttaagaaccagttgcctgcttctggcgtgaaattgaatgaactagtcgccaaattacaggcttgttatcaactcactacaggaggcaaattcacggaagccatagaaaaattccaaactcttcttctctcagtaacgttagtagtagtagagaataaacaagaaatatcggaagcgcaacagttgttgaggatatgtagtgaatacatttgtggtcttcagatggaaactttaagaaaaactttaccaaaagcttcacatgaagaacaaaaacgtcaatgcgagatggcggcttacttcacacattgcagacttcagcctatacatcaaattttaacactcaggactgctctaaatatgttctttaagctaaaaaattacaaaacagcagcatcatttgctaaaagacttcttgagcttggcccaagacctgaagtagctcaacaagctagaaagatcattcaagcctgtgataccgatctaaccgatgaattacagatgcagtatgatgaacataatcctttcaacctgtgtggtcattcatatacaccgatttatagaggaaaagctgaagaaaagtgtccgttgtgtggaacttcttatctacctaaatataagggaacattgtgcaatgtttgccgggtagctgaagttggaaaggattgtattggactcagaataagtgtacatcaatttagataggttaaatgcattttgtatttggaaatgattaagtattgatatatttgagatcttattctcaggttagagaa

SEQ ID NO: 1285 - DNA, 2813 bp, Diabrotica barberi
ttttggtcgtcggctgatgtgacgtgtaaagaaattaaatcaaattattttaaagtttttaaattaaaatgggtacttttaaaagagatactcatgatgaggacgggggatcaagtgcttttcaaaatctggagaaaactactgttttgcaggaagctagagtttttaatgaaactagtgtaaatccaagaaaatgtacaccgatactaacaaaactgttgtacttattgaaccagggtgaaactttgagtgccaaagaggccacagatgttttcttcgccatgaccaaactattccaatcaaaagatgtaatattaagaaggatggtttatttgggaattaaagaactcagttctgttgctgatgatgttattatcgtaacatccagtcttacaaaagatatgactggtaaagaagacatgtacagagcagctgctataagagcattatgcagtattactgatgctactatgcttcaagctatagagcgatatatgaagcaagctattgtagatagaaacgcagctgtcagttcagcagcactaattagttcattacatatgagcaaattagccccagatgtagtaaagagatgggtaaatgaagctcaggaagcagtaaatagtgataatgcaatggtacagtatcacgcattaggtcttctataccatattaggaagactgataagctagcagtgacaaaattgatttccaagctgaattcaatgggtttaaagagcccatatgctttatgtatgttgataagaatcactgcaaaacttttagaagaagaggaccaagagtctctcctcaactccccatatacaataatatttacaatgggcttaaggaacaaatctgaaatggtggtgtatgaagctgcacatgccatggttaacctgaagttcacgagtagtaatgtgctagcacccgctataagtgttctacaactattttgtggatctcctaaagccacactcagatttgctgctgttagaactttaaatcaagtagccaccacccaccctgcgtcagtgacagcttgtaatttggatctagaaaatttgattactgatcctaatagatcaattgctacactggccattactactcttttgaaaacaggtgccgaatcttctgttgacagactaatgaaacaaatcgctacttttgtatctgaaatcagtgatgaatttaaagtggttgtcattcaggcaattaaggtattagctttgaaatttccaaggaaacatagcacgcttatgaatttcctatccgccatgttaagagatgagggaggtttagaatataaagcgtccatagcagataccattataactctaatcgaagataatcctgaagctaaagaatctggtttggcgcatctttgcgagttcattgaagactgtgaacatgtttctttggctgtgagaatcttgcatttgttaggaaaggaaggacccaagaccaaacaaccatcgagatacattcgttttatctacaatcgcgtcatattggaatgtccttctgtaagagctgctgcagtctccgccatggcacaattcggagcttcttgtccagatttgttagaaaatatccaaatattactttcgaggtgtcagatggattcagacgatgaagttagggacagagctacatattatagtaatatacttaacaaaaatgataaaagtttatacaacaattacattttggattctttgcaggtttcaattccttcactagaaagatcgcttagagaatacattcaaaattcaactgacgaaccatttgacattaagtccgtacctgtagcagcagtgccaacagcagaagaacgagaagttaaaaacaaatctgaaggactgctagtctctcaaggtccagtccgacctcctccggtgtctagagaagaaaacttcgccgaaaaacttagtaacgttccgggtatacaacagttaggacctttgttcaaaacttccgacgtcgtggaactcactgaatctgaaacagagtattttgtccgctgtatcaagcactgtttcaaacatcacatcgtcctccaattcgattgtctgaataccttgccagaccagcttttagaaaacgttagagtggagatagacgccggtgaaaccttcgaaattttggcagaaataccttgtgaaaagttgcactataacgaaaccggtaccacatatgtagtagttaagttgcctgatgatgatctccccaactctgttggtacgtgtggagccgtgttgaagttcttagtgaaagattgtgatccatcaacaggaataccagattctgatgagggttacgatgatgaatatacactggaagacatcgaaataacattaggggaccaaattcaaaaagtaagcaaagtaaattgggctgcagcctgggaagaagctgcatctacttatatagaaaaagaggatacatactccttgaccatcaatacgctaagtggtgctgttaagaatattattcagttcttgggattacaacctgcggaaaggactgacagagtaccggagggtaaatctacgcacacactacttcttgctggtgtattcaggggaggtattgacatactagtaagagcgaaactagctttgggcgaatgtgttacgatgcaactaacagtcaggtcgccagatccagacgttgctgagcttataacttcaactgtaggttaagtttaaaggctacgttaattattatattgtattacaatttttccatatgtataaatattttgatttatttaaattttattagaaattaaacaaatttaagtaaaa

SEQ ID NO: 1286 - DNA, 1717 bp, Diabrotica barberi
attattattttgtaaacctgtgccattaaacaaataaagcgatggtgctaattgcagcagcagtctgcacgaaagcaggcaaaacaattgtgtctcgacaatttgttgaaatgaccaaagctagaatagaaggtttgttggccgcctttcctaaattaattcctacaggaacccagcatacatttgtggaaacagattcagtacggtatgtttatcaacccctagagaaactgtatatggttcttattacaactagagctagcaacatattagaagatcttgaaaccctccgtctcttcgcaagagtgattcctgagtactgcaaatctttagatgaaaatgaaattgcagagaatgcattttcacttatatttgcttttgatgaaatagtggcattaggttatagggaaagtgtcaatctgtctcaaattcgcacatttgtggaaatggactcgcacgaagaaaaagtttatcaggccgtgagacagactcaagagcgagaggccaagaatatgatgagagaaaaggcaaaagaacttcagagacagaagatcgaagcggccaaaaaaggagggaagacctcgtttggtagtagcagtggctttggcagctcgacaggttatactcctacgccatctgttggtgatgtagctaaccagacaaatgatgttaaaacttcttcatacacaccagcccctgcacaaaaacctcggggtatgaaattaggtggaaaaggtagagatgtagaatcattcgtagatcagcttaaatcagaaggagaaaacgtcattactccaaacaaaaatagtatttcacagccaggaactaaagctccagctatcaaaactgacatcgatgatgttcatttaagattggaagaaaaattaatagtgagaataggtcgtgatggtggcgtacaacaattcgaattattgggacttgctactttacacattggagatgagagatggggtaggatacgtgtgcaattggaaaatcagaatacccacggtgttcaacttcaaacgcatcctaatgtagataaagaattattcaaactacgctcacagattggattgaaacaaccggctaaaccttttcctctaaatacagatgttggtgtactgaagtggagattacaaagtactgaggaagctttaattccactcttaataaattgctggccttcagaagcgggagatggtagttgcgatgttaatatagaatatgagcttgcccacactaatttggaactagttgatgtcaatattattattcccttgccaattggatgttcaccaatagttggtgaatgtgatggtatgtacacacacgaagccaagcgtaatcaactggtatggaatttgcctctaattgatgccagtaataaaactggttcattagaatttaacgctcctagggccatacccgctgatttcttcccgctttccgttggattcaattcgaagtcgtcctatgcgagtattaagattaccgaagttgtcctagttgatgatgattctcctataaaatattcagtggagactgcactatatccagataaatatgaagtagtataatggggcagaagtaaagaatcacttgtaaaaattatataactaatattatatcttatatgcaacattgctttttgtacaaaagttaagtaacttgtctttattttatctatattaataaaataagtaagaaagtaaaa

SEQ ID NO: 1287 - DNA, 946 bp, Diabrotica barberi
aaaaaaagatctcgcgagagcgaatgtagtatagttctatacaaaataatacaatcaagctggaatggcagaaactgaaggggaatattgctggcaaatcctgtgaaaatcattttcttttatcttcagatcacgaatgtatggatgatcaggatttgcatctttcaactgggataggtacctattagcaatctcaggtgctttggccatatgcctctgaagggtgatcatgttaacaagagtatcaggatagttggcatccttatcaagtgcttcttgaagagctgcttcggcttcctcatatttggcttgaccaatgaaagtcactgcttgtccatttagcaacaatggagtggacccatatttgtctacaagttcttggtaaatgtagtaggcatcctggagtttatctccaccagcggctaaattaatccaagcttgagccagttgtgttaaagtagcatcatcgtccttatcttgcatctctttgagcttcttccttgccaaatctactctatccaatttcaaaagtatatctataataaaggccattgcttcgaggctttctgtagcgtgcagaactttatacgcagcatcaagattgccttcgttaacataaatagtagctgctaccaaaattagagtatcattgttagcatttgcttggacttgttgctccacctgggccaccacagaatccttcttgattttgcctgctaagtagtcagcgaggtatttcaggggttggatttctgggggagatgccccgtggatttcgtctaatactactaggaatttattttgggccatataggaccggtaggtgtagaagtctctttggactgccacttcgggcgtagacggctttcgaagtttttgtgcctcgtttatgcattgttggtaatttccaatataaaaataattttttatttcgaaaagttcgtcc

SEQ ID NO: 1288 - DNA, 407 bp, Diabrotica barberi
acctgggcaactgtttgttccccgatttgaagatcatcgtttcggagagctattctggagattactgaattcgagtctgcccccatcattatcccttcatcacaaatttcatccacagctaacattacaatatctaattgatctaaaagtgccttcctttccatatttttctttaagatctggttaattgtgtcatataaacaatttaaaacactcacaagcataagctcattttcttgggaacttcctataacataaaaaagcagttcaacattactcttataaacacacgttaagccatttacattgataatttcaccgtctgccttgtaggttttattaaataaggttttctcaaatgcactttgttctttggatgtgataaatagatttttgtcatagtattt

SEQ ID NO: 1289 - DNA, 609 bp, Diabrotica barberi
ttgtaaatttattctaagccattcttaattaaagcgattaaagtaacaataaaatggaaggaatactactggaaccaaccttgtataccataaaaggtattgctatattggactacgatggtaatagagtactggctaaatactatgataaagatatatttcctacagcaaaagagcagaaagctttcgagaaaaatttattcaataaaacacacagagcagatgcagaaatcatcatgttggatggtttaacttgtgtatataggagtaatgtagatttattcttttatgttatgggcagttcacatgaaaatgagctaattttaatgagtgttttaaattgcttgtatgactcagtaagtcagatattaaagaaaaatatgcaaaaacgagctgtcttggaatcactagatattgttatgttggcaatggatgaaattgttgatggagggataattatagattctgattcaagttcagtagtatctagaatagcactaaggactgatgatattccattaggggaacaaactgtagctcaggtattccaaacagccaaggaacagctgaaatggtcattgttgaaataaagtgtgtattttaaacaaa

SEQ ID NO: 1290 - DNA, 3915 bp, Diabrotica undecimpunctata
tttgttaaaagtatatgtttttcttacagtaaaagacaattttaagttgaaatgtgctaataatgcgataggtattgtataaagttataactgagtctatatatagtgtgttttgaaaaaactaacatgttaaccaagtttgaaacaaaatccgcccgggtaaaagggctatcttttcatcctaaacgtccctggatcttaactagtcttcacaatggttgtatccaattatgggactaccgcatgtgcaccctcttagagaaatttgatgagcatgatggccctgtaagaggcatttgcttccacaatcaacagcccttatttgtttctggtggtgatgattacaagatcaaagtatggaattacaaacaaaaacgatgcatttttactctattgggtcatttagattacattcgcacaacattgttccaccatgaatatccatggatagtttctgcatctgatgatcaaactattaggatctggaattggcagagcagaacttgcatttgtgttctaactggacataatcactatgttatgtgtgtaagttttcatccttctgaagatttgctggtgtcagcttctttggattccactgttagagtttgggacatttcaggcttaagaaagaaaaatgtagctccaggtccagcaggactagaagaacatttgaagaatccaggagcaactgatctttttggtcaagcagatgcagttgtaaaacatgtgttagagggtcatgatagaggtgtcaactgggcatctttccatccaactctgcctcttattgcctctggtgctgatgatagacaagtaaaattatggagaatgaatgattctaaagcatgggaggttgatacatgtagaggccattggcataatgtttcttgtgttttgttccatcctagacaggaactgattctctcaaacagtgaagataaaactattagggtttgggatacaactaaaagaacttgtctacatacatttaaaagggaaaatgaaagattttggataatggcatcacatccgaaccttaacttgtttgctgcgggacatgatggtggaatggttatattcaaacttgagcgtgaacgtccagcttacacagtacatggcaacctcctgtactatgttaaggaacgtttcttacgaaaacttgattttacaacatctaaagatgttccagtcattcagattcgcggtggaggaaaaataccagtttataagatgtcctttaatcccgctgaaaatgctgtgctactttctacaagaacttcaaacttggataatagtacatatgatttatatgtgattccaaaagagcaggagagagatgatcaagtaccagaagctgaaagtaaaaggtcttctggacttacggcattatgggttgcaagaaatagatttgcagttttggacaggactcatcaattaattataaagaacttgaagaacgaagtcaccaagaaggtacaaactcctacatgtgatgaagtattttatgctggtactggaatgctgttattgagagattctgaacatgttactctgtttgacgttcaacagaagagaactttagcacaagtgaaaattaacaaatgcagatacgttgtctggtcgtctgatatgtcccacttggctctgctttccaaacacaacgtgactatttgtaataggaaattggatgttttatgttgtttacatgaaaatactagagtaaaatctggagcttgggatgatacaggagtttttatttatactacaagcaaccacttgaaatatacacttaaaaatggtgaccaaggaattattagaaccctcgatcttccaatatacatcaccagagtaagaggaaaccagatcttttgccttgatcgcgaatgcaaaccacgagtattgaccgtggattcaatggaatacaagttcaaacttgcattaattaatcacaaatatgaagaagttttgtatatggttagaaattctaaattggtcggacaatccatgatttcttacttacaacaaaaaggttatcctgaggtagccctacattttgtaaaagacgacaaaactcgatttactttggctctggaatgtggaaatattgagattgctctggaagctgcgaaatctctgaatgacaaagcttgttgggatcagcttgcacatgctgcactatggcaaggaaaccatcaagtagttgaaatgtgttatcaaaggaccaagagtttcgaaaaattatcattcctatatctgattaccggcaatctggataagttaagaaaaatgatgaaaattgcggaaattagaaaagctaaatcatctcaatatcatgctgcacttttgcttggtgatcttgaagagcgtgttaaaattttaaaggcttccaatcaactttctttagcctacttgacagctgctactcacggaatgctagatgaagctgaacagttgaaggaacaaattggggaaaagaaaggttttccagatgtagatccaaatgccaaatttttgaagccaccccctccaattcaacaagcagaatccaactggcctttgttgacagttagtaggggctttttcgaaaatacagccgcagtttctacagcttcggctaacatgaaatctcttatggccgaacccgtggccgatatgggaatggaagaggcaccaggttggggagacgacgacgaactggaactggacccagaagagaagaaagctgaagctgctgcaggtggtggtgatggtgaaggcggctgggatgttgaagatgaaggattagaaatacctgatttgggtccatcggttgctgttgaagcagagggcaattttgttcatttacctacgcaaggtccatccccactggtaacatggaccaaaaattcgcagttagttgctgaccacattgctgccggttcgttcgaatcagctgcgaggttgcttcatgatcaattaggagtagtcgattttaaaccatacgaaagcttatttattagtttatatagcagttccagaacagtttattcttggcagcaaaatataccgccgtcatttagctacccgttgagaaattggaaagatgccaaccttaagaaccagttgcctgcttctggtgtgaaattgaatgaactagtcgccaaattacaggcttgctatcaactcactacaggaggcaagttcacggaagccatagaaaaattccaaacccttcttctctcagtaacgttagtagtagtagagaataaacaagaaatatcggaagcacaacagttgttgaggatatgtagtgaatacatttgtggtcttcaaatggaaactttaagaaaaactttaccaaaatcttcacacgaagaacagaaacgtcaatgcgagatggcggcttacttcacacattgtaaactccagcctatacatcaaattttaacactcaggactgctctaaacatgttctttaagctcaaaaattacaaaacagcatcatcatttgctaaaagacttcttgagcttggcccaagacctgaagtagctcaacaagctagaaagatcattcaagcctgtgataccaatctcaccgatgaattacagatgcagtatgatgaacataatcctttcaatttgtgtggtcactcgtatacaccgatttacagaggaaaggctgaagaaaagtgtcccttgtgtggaacttcatacttgcctaaatataagggaaccttgtgcaatgtttgccgggtagctgaaattggaaaggattgtattggactcagaataagtgtacatcaatttagataggttagatgcattttgtatatggaaatgattaagtattgaaatatttgagatcttattctcaagtttagagataatgttttattataaattttattttatttgtaaaaatatatgtttgat

SEQ ID NO: 1291 - DNA, 2775 bp, Diabrotica undecimpunctata
gaaattaaatcgaattatttaaaagtttttaattaaaatgggtacttttaaaagggatactcatgatgatgatgggggatcaagtgcttttcaaaacctggaaaaaaccactgttttgcaagaagctagagtttttaatgaaactagtgtaaatccaagaaaatgtacaccaatactaacaaaactgttgtatttattgaaccagggtgaaactttgagtgccaaagaggccacggatgttttcttcgctatgaccaaactgttccaatcaaaagatgtaatattaagaaggatggtttatttgggaattaaagaactcagttctgttgctgatgatgtcattattgtaacatccagtcttacaaaagatatgactggtaaagaagacatgtacagagcagcagctattagagcattgtgcagtattactgatgctactatgcttcaagctatagaacgttatatgaagcaagctattgtagatagaaacccagctgtcagttcagcagcactaattagttcattacatatgagcaaattggctccagatgtagtaaaaagatgggtaaatgaagctcaagaagcagtaaatagtgataatgcaatggtacagtatcacgcattgggtcttctataccatattaggaagactgataagctagcagtgacaaaattgatttccaaattgaatcaaatgggtttaaagagcccttacgctttatgtatgttgataagaatcactgcaaaacttttagaagaagaggaccaagagtctctcctcaactcaccatatacaatgatatttacaatgggcttgagaaacaaatctgaaatggtagtgtatgaagctgcacatgccatggttaacctgaagctcacaagtagtacggtgctagcacctgctataagtgttctgcaactattttgtggatctcctaaagctacactcagatttgctgctgttagaactttaaatcaagtagccaccacccaccctgcctcagtgacagcttgtaatttggatctagaaaacttgattactgattctaatagatcaattgctacactggccattactactcttttgaaaacaggtgctgaatcttctgttgacagactaatgaaacaaatcgctacttttgtatctgaaatcagtgatgaatttaaagtggttgtcattcaggcaattaaggtattagctttgaaatttccaaggaaacatggcacacttatgaatttcctatccgccatgttaagagatgagggaggcttagaatataaagcatccatagcagataccattataaccctaattgaagataaccccgaagctaaagaatctggattggcgcatctttgcgagttcattgaagattgtgaacatgtttctttggctgtgagaatcttacatttgttaggaaaagaagggcccaagaccaaacaaccatcacgatatatccgttttatttacaatcgtgtcatattggaatgcccctctgtaagagctgctgcagtctctgccatggcacaattcggagcttcttgtccagatttgttagaaaatatccaaatattactttcgaggtgtcagatggattcagacgatgaagttagagaccgagctacatattatagtaatatacttaacaaaaatgataaaagtttatacaacaattacattttggattctttgcaggtatcaatcccttcactagaaagatcgcttagagaatacattcagaatccaactgacgaaccatttgacattaagtccgtacctatagcagcagtgccaacagcagaagaacgcgaagttaaaaacaaatctgaaggactgctagtctctcaaggtccagtccgacctcctccggtgtctagagaagaaaacttcgcagaaaaacttagtaacgttccgggtatacaacagttaggtcctttgttcaaaacttccgacgtcgtggaactcactgaatctgaaacagagtattttgtccgctgtatcaagcactgtttcaaacatcacatcgtccttcaattcgattgtctcaataccttgccagaccagcttttagaaaacgttagagtggaaatagacgccggtgaaaccttcgaaattttggcagaaataccttgtgaaaagttgcattataacgaaactggtaccacatatgtagtagttaagttgcccgatgatgatcttccaaactctgttggtacttgtggagccgtgctgaagttcttagtgaaagattgtgatccatcaactggaataccagattctgacgagggttacgatgatgaatatacgctggaagacatcgaaataactttaggggaccaaatccaaaaagtaagcaaagtaaattgggctgcggcttgggaagaagctgcagctacttatgtagaaaaagaagatacatactcattgaccatcaatacgctaagtggcgctgttaagaatattattcagttcttgggattacaacctgcggaaaggactgacagagtaccggagggtaaatctacgcacaccttacttctagctggtgtattcaggggaggtattgacatactagtaagagcgaaactggctttgggcgaatgtgttacgatgcaactaactgtcaggtcgccagatccagatgttgctgagcttataacttcaactgtaggttaagtttaaatgctacgttaatgattatgtattacaatttttccatatgtataaatattttgatttatttaaattttattagaaattaaacaattttaagt

SEQ ID NO: 1292 - DNA, 1763 bp, Diabrotica undecimpunctata
ctggagagtacacgtcaacgtcatctcagtttggtttattgttgggtgtaatgtttaaataaaataattattattttgtaaacctgtgccattaaacatatatagcgatggtgctaattgcagcagcagtctgcacgaaagcaggcaaaacaattgtgtctcgacaatttgttgaaatgactaaagctagaatagaaggtttgttggctgcctttcctaaattaattcctacaggaactcaacatacctttgtggaaacagattcagtacggtatgtttatcagcccctagagaaactatatatggttcttattacaactagagctagcaacattttagaagatcttgaaaccctccgtctatttgcaagagtgattcctgagtactgcaaatctttagatgaaaatgaaattgcagaaaatgcattttcacttatatttgcttttgatgaaatagtggcattaggttatagggaaagtgtcaacctgtctcaaattcgcacatttgtggaaatggactcgcacgaagaaaaagtttatcaagctgtaagacagactcaagaacgagaggccaagaatatgatgagagaaaaggcaaaggaacttcagagacagaagatcgaagcagccaaaaaaggagggaagacctcgtatggtagcagcggtggctttggcagctcgacaggttatactcctacgccatctgtcggtgatctagctaaccagacaaatgatgttaaaacttcttcgtacacacctgcccctgcacaaaaacctcggggtatgaagttaggtggaaaaggtagagatgtagaatcatttgtagatcagcttaaatcggaaggagaaaacgtcattactccaaacaaaaatagtatttcacagccaggatctaaagctccagctatcaaaactgacatcgatgatgttcatttaagattggaggaaaaattaatagtgagaataggtcgtgatggtggtgtacaacaattcgaattattgggactagctactttacacattggagatgagagatggggtaggatacgtgtgcagttggaaaatcagaatacccacggtgttcaacttcaaacacatccaaatgtagataaagaattattcaaactacgctcacagattggattgaaacaaccggctaaaccttttcctctaaatacagatgttggtgtactgaaatggagattacaaagcaccgaggaagctctaattccactgttaataaattgctggccttcagaagcgggagatggtagttgtgatgttaatatagaatatgagcttgcccacactaatttggaactagttgatgttaatattgttattcctttgccaattggatgttcacctatagttggtgaatgtgatggtatgtacacacacgaagccaagcgtaatcaactggtatggaatttgcctctgattgatgccagtaataagactggttctttagaattcaatgctcccagggccatacccaacgatttcttcccactttccgttggattcaattcgaagtcgtcctatgcgagtattaagattaccgaagtcgtcatggttgatgatgattctcctataaaatattcagtggagactgcactatatccagataaatatgaagtagtataatggggcagaagtaaagaatcacttgtaaaaattatataactaatattatatcttatatgcaacattgctttttgtacaaaagttaagtaacttgtctttattttatctatattaata

SEQ ID NO: 1293 - DNA, 982 bp, Diabrotica undecimpunctata
tttataaacaaaaatggcacgtcagcaacaagacgtggacgaacttttcgaaataaaaaattatttttatattggaaattaccaacaatgcataaacgaggcacaaaaactcagaaagccgtcaacgcccgaagtagccgtccaaagagacttctacacctaccggtcctatatggcccaaaataaattcctagtagtattagacgaaatccacggggcatctcctccagaaatccaacccctaaaatacctcgctgattacttagctggtaaaatcaagaaggattctgtggtcgcccaagtggagcaacaagtacaagcaaatgctaacaatgatactctaattttggtagcagctactatttatgttaacgaaggcaatctcgaagctgcatataaagttttgcatgctacagaaagcctggaagcaatggcatttattatagatatacttttaaaattggatagagtagatttggcaagaaagaagctcaaagaaatgcaagataaggatgatgatgcaactttaacacaactggctcaagcttggattaatgtagccactggcggagataaactccaggatgcctactacatttaccaagaacttgtagacaaatatggatccactccattgttactaaatggacaagcagtgactttcattggtcaagccaaatatgaggaagccgaagcagctcttcaagaagcacttgataaggatgccaactatcctgatacacttgttaacatgatcacccttcagagacatatggctaaagcaccagagattgctaatagatatctgtctcagttgaaagatgcaaatcctgatcatccatacattcgtgatctgaagataaaagaaaatgattttcacaggatttgccagcaatattccccttcagtttcagccattccagcttaattgtattattttgtatataattattaataaatatttaataaatgtaaatttcag

SEQ ID NO: 1294 - DNA, 781 bp, Diabrotica undecimpunctata
ataggctaggaaatggagggaatgctatgggaaccaaccttatatactgtaaaaggtattttaataatggattgcactggtgacagagtattggccaaatactatgataaaaatgtatttcctacatccaaagaacaaagggcatttgagaaaaacttatttagtaaaaccttcaaaaatccagagggggaaattatcaatgtaaatggtttaacctgtgtttataaaagtaatgttgaactgcttttttatgttataggaagttctcaagaaaatgagcttatgcttgtgagcgttttaaattgtttatatgacacgattaaccagatcttaaagaaaaatatggaaaggaaagcactcttagattcattagatattgtgatgttagctgtggatgaaatttgtgatgaagggataatgatagccgcagactcgaattcagttatatctagaatagctctccgaaacgatgatattcaaatcggagaacaaactgtagcccaggtaactactgcgatacattctttgttttggtaggatatataaactgtaaaaatagtgtttttttgttaaatttatacattactacagttgtaaagatagcagtatttttgtatttgtgtacgaattatattttaaatattgaacaaataaatttatttataggtgtttcaatctgccaaagaacagctgaaatggtcatttttaaagtaagagatatattttaatacaaaaaacaatgttaaatgttacacatttatttcatattataaaaataaat

SEQ ID NO: 1295 - DNA, 586 bp, Diabrotica undecimpunctata
ataaaaggtatcgctatattggactatgatggtaatagagtgttggctaaatactatgataaagatatatttccaactgcaaaagagcagaaagcttttgagaaaaatttattcaataaaacccacagggcagatgcagaaattatcatgttggatggtttaacttgtgtgtatagaagtaatgtagatttattcttttatgttatgggcagttcacatgaaaatgagctaattctaatgagtgttttaaattgcttgtatgactcagtaagtcaaatattgaagaaaaatatgcaaaaaagagctgttttggaatcactagatattgttatgctggctatggatgaaattgttgatggagggataattatagattctgattcaagttcagtagtatctagaatagcactaagaactgatgatattccattaggggaacaaactgtagcacaggtattccaaacagccaaggaacagctaaaatggtcactgttgaaataaagtgtgtattttaaaagaaggtgatcggtatttatttcatgtacaatttaattattaagctgtaaataaatttattgtgtttaaa

SEQ ID NO: 1296 - DNA, 1000 bp, Diabrotica virgifera
atgttaactaagtttgaaacgaaatccgcccgggtaaaagggctgtcttttcaccctaaacgtccctggatcttaactagtcttcacaatggttgtatccaattatgggactaccgtatgtgcaccctcctagagaaatttgatgagcatgatggccctgtaagaggcatttgcttccacaatcaacagcccttatttgtttctggtggtgatgattacaagatcaaagtatggaattacaaacaaaaacgatgcatttttactctattgggtcatttagattatattcgtacaacattgttccaccatgaatatccatggatagtttccgcatctgatgatcaaactatcaggatctggaattggcagagcagaacttgcatttgtgttttaactggacacaatcactatgttatgtgtgtaagttttcatccttctgaagatttgctggtgtcagcttcattggattccactgtcagagtttgggacatttcaggcttaagaaagaaaaatgtagctccaggtccagcaggactagaggaacatttgaagaatccaggagcaactgatctttttggtcaagcagatgcagttgtaaaacatgtgttagagggtcatgatagaggtgtaaactgggcatctttccatccaactctgcctcttattgcctctggtgctgatgacagacaagtaaaattatggagaatgaatgattctaaagcatgggaagttgatacatgccgaggccactggcataatgtttcttgtgttttattccatcctagacaggaactgattctctcaaacagtgaagataaaactattagagtttgggatacaactaaaagaacttgcctacatacatttaaaagggaaaatgaaagattctggataatggcatcacatccaaacctcaacttgtttgctgctggacatgatggtggaatggttatattcaagcttgagcgtgaacgtccagcttacacagtacatggcaacc

SEQ ID NO: 1297 - DNA, 1000 bp, Diabrotica virgifera
tcctgtattatgttaaagaacgttacttacgaaaacttgattttaccacatctaaagatgttccagtcattcagattcgtggtggaggaaaaataccagtttataagatgtcctttaatccagctgaaaatgctgttcttctttctacaagaacttcaaacttggataatagcacatacgatttatatgtgattccaaaagagcaggagagagatgatcaagtaccagaagctgaaagcaaaaggtcttctggacttacggcattatgggttgcaagaaacagatttgccgttttggacaggactcatcaactaattatcaagaacttgaaaaacgaagtcaccaagaaggtacaaactcctacatgtgatgaagtattttatgctggtactggaatgctgttattaagagattctgaacatgttactctgtttgacgttcaacagaagagaactttagcacaagtgaaaattaacaaatgcagatacgttgtctggtcgtctgatatgtcccacttggctctcctttccaaacacaacgtgactatttgtaataggaaattggatgttttatgttgtttacacgaaaatactagagtgaaatctggagcttgggatgatacaggagtttttatttatactacaagcaaccatttgaaatatacacttaaaaacggtgaccaaggaattattagaaccctcgatcttccaatatacatcaccagagtaagaggaaaccagatcttttgccttgatcgtgaatgcaaaccacgggtattgacagtggattcaatggaatacaaattcaaacttgcattaattaatcacaaatatgaagaagttttgtatatggttagaaattcaaaattggtgggacaatctatgatttcttacttacaacaaaaaggttatcctgaagtagccttacattttgtaaaagacgacaaaactcgatttactttggctctggaatgtggaaatattgagattgctctagatgc

SEQ ID NO: 1298 - DNA, 350 bp, Diabrotica virgifera
aaatttggcaggtagattccttgctaataatgcgataagtattgtatagagttataactgagcctaatcattgtgttttaaaaactatcatgttaactaagtttgaaacgaaatccgcccgggtaaaagggctgtcttttcaccctaaacgtccctggatcttaactagtcttcacaatggttgtatccaattatgggactaccgtatgtgcaccctcctagagaaatttgatgagcatgatggccctgtaagaggcatttgcttccacaatcaacagcccttatttgtttctggtggtgatgattacaagatcaaagtatggaattacaaacaaaaacgatgcattttt

SEQ ID NO: 1299 - DNA, 362 bp, Diabrotica virgifera
tcgtacaacattgttccaccatgaatatccatggatagtttccgcatctgatgatcaaactatcaggatctggaattggcagagcagaacttgcatttgtgttttaactggacacaatcactatgttatgtgtgtaagttttcatccttctgaagatttgctggtgtcagcttcattggattccactgtcagagtttgggacatttcaggcttaagaaagaaaaatgtagctccaggtccagcaggactagaggaacatttgaagaatccaggagcaactgatctttttggtcaagcagatgcagttgtaaaacatgtgttagagggtcatgatagaggtgtaaactgggcatctttccatc

SEQ ID NO: 1300 - DNA, 383 bp, Diabrotica virgifera
ctggtgctgatgacagacaagtaaaattatggagaatgaatgattctaaagcatgggaagttgatacatgccgaggccactggcataatgtttcttgtgttttattccatcctagacaggaactgattctctcaaacagtgaagataaaactattagagtttgggatacaactaaaagaacttgcctacatacatttaaaagggaaaatgaaagattctggataatggcatcacatccaaacctcaacttgtttgctgctggacatgatggtggaatggttatattcaagcttgagcgtgaacgtccagcttacacagtacatggcaacctcctgtattatgttaaagaacgttacttacgaaaacttgattttaccacatct

SEQ ID NO: 1301 - DNA, 178 bp, Diabrotica virgifera
cgtacaacattgttccaccatgaatatccatggatagtttccgcatctgatgatcaaactatcaggatctggaattggcagagcagaacttgcatttgtgttttaactggacacaatcactatgttatgtgtgtaagttttcatccttctgaagatttgctggtgtcagcttcattgg

SEQ ID NO: 1302 - DNA, 180 bp, Diabrotica virgifera
ccactgtcagagtttgggacatttcaggcttaagaaagaaaaatgtagctccaggtccagcaggactagaggaacatttgaagaatccaggagcaactgatctttttggtcaagcagatgcagttgtaaaacatgtgttagagggtcatgatagaggtgtaaactgggcatctttccatc

SEQ ID NO: 1303 - DNA, 189 bp, Diabrotica virgifera
ctggtgctgatgacagacaagtaaaattatggagaatgaatgattctaaagcatgggaagttgatacatgccgaggccactggcataatgtttcttgtgttttattccatcctagacaggaactgattctctcaaacagtgaagataaaactattagagtttgggatacaactaaaagaacttgcctac

SEQ ID NO: 1304 - DNA, 169 bp, Diabrotica virgifera
gattctggataatggcatcacatccaaacctcaacttgtttgctgctggacatgatggtggaatggttatattcaagcttgagcgtgaacgtccagcttacacagtacatggcaacctcctgtattatgttaaagaacgttacttacgaaaacttgattttaccacatc

SEQ ID NO: 1305 - DNA, 1000 bp, Diabrotica virgifera
atgaccaaactgttccaatcaaaagatgtaatattgagaaggatggtttatttgggaattaaagaactcagttctgttgctgatgatgtcattattgtaacatccagtcttacaaaagatatgactggtaaagaagacatgtacagagcagctgctataagagcattatgcagtattactgatgctactatgcttcaagctatagaacgttatatgaagcaagctattgtagatagaaacgcagctgtcagttcagcagcactaattagttcattacatatgagcaaattagctccagatgtagtaaaaagatgggtaaatgaagctcaggaagcagtaaatagtgataatgcaatggtacagtatcacgcattaggtcttctataccatattaggaagactgataagctagcagtgacaaaattgatttccaagctgaattcaatgggtttaaagagcccttatgctttgtgtatgttgataagaatcactgcaaaacttttagaagaagaggaccaagagtcactcctcaactccccatatacaataatatttacaatgggcttaaggaacaaatctgaaatggtggtgtatgaagctgcacatgccatggttaacctgaagttcacgagtagtaatgtgctagcacccgctataagtgttctacaactattttgtggatctcctaaagccacactcagatttgctgctgttagaactttaaatcaagtggccaccacccaccctgcgtcagtgacagcttgtaatttggatctagaaaatttgattactgatcctaataggtcaattgctacactggccattactactcttttgaaaacaggtgccgaatcttctgttgacagactaatgaaacaaatcgctacttttgtatctgaaatcagtgatgaatttaaagtggttgtcattcaggcaattaaggtattagctttgaaatttccaaggaaacatagcacgcttatgaatttcctatccgcca

SEQ ID NO: 1306 - DNA, 1000 bp, Diabrotica virgifera
tgttaagagatgagggaggtttagaatataaagcatccatagcagataccattataaccctaatcgaagataatcccgaagctaaagaatctggtttggcgcatctttgcgagttcattgaagactgtgaacatgtttctttggctgtgagaatcttgcatttgttaggaaaggaaggacccaagaccaaacaaccatcgagatacatccgttttatctacaatcgcgtcatattggaatgtccttctgtaagagctgctgcagtctccgccatggcacaattcggagcctcttgtcccgatttgttagaaaatatccaaatattactttcgaggtgtcagatggattcagacgatgaagttagggacagagctacatattatagtaatatacttaacaaaaatgataaaagtttatacaacaattacattttggattctttgcaggtttcaattccttcactagaaagatcgcttagagaatacattcaaaatccaactgacgaaccatttgacattaagtccgtacctgtagcagcagtgccaacagcagaagaacgagaagttaaaaacaaatctgaaggactgctagtctctcaaggtccagtccgacctcctccggtgtctagagaagaaaacttcgccgaaaaacttagtaacgttccgggtatacaacagttaggacctttgttcaaaacttccgacgtcgttgaactcactgaatctgaaacagagtattttgtccgctgtatcaagcactgtttcaaacatcacatcgtcctccaattcgattgtctgaataccttgccagaccagcttttagaaaacgttagagtggagatagacgccggtgaaaccttcgaaattttggcagaaataccttgtgaaaagttgcactataacgaaaccggtaccacatatgtagtagttaagttgcctgatgatgatctccccaactctgttggtacgtgtggagccgtgttgaagttcttagtgaaaga

SEQ ID NO: 1307 - DNA, 365 bp, Diabrotica virgifera
gcagctgctataagagcattatgcagtattactgatgctactatgcttcaagctatagaacgttatatgaagcaagctattgtagatagaaacgcagctgtcagttcagcagcactaattagttcattacatatgagcaaattagctccagatgtagtaaaaagatgggtaaatgaagctcaggaagcagtaaatagtgataatgcaatggtacagtatcacgcattaggtcttctataccatattaggaagactgataagctagcagtgacaaaattgatttccaagctgaattcaatgggtttaaagagcccttatgctttgtgtatgttgataagaatcactgcaaaacttttagaagaaga

SEQ ID NO: 1308 - DNA, 372 bp, Diabrotica virgifera
ggaccaagagtcactcctcaactccccatatacaataatatttacaatgggcttaaggaacaaatctgaaatggtggtgtatgaagctgcacatgccatggttaacctgaagttcacgagtagtaatgtgctagcacccgctataagtgttctacaactattttgtggatctcctaaagccacactcagatttgctgctgttagaactttaaatcaagtggccaccacccaccctgcgtcagtgacagcttgtaatttggatctagaaaatttgattactgatcctaataggtcaattgctacactggccattactactcttttgaaaacaggtgccgaatcttctgttgacagactaatgaaacaaatcgc

SEQ ID NO: 1309 - DNA, 365 bp, Diabrotica virgifera
tcagtgatgaatttaaagtggttgtcattcaggcaattaaggtattagctttgaaatttccaaggaaacatagcacgcttatgaatttcctatccgccatgttaagagatgagggaggtttagaatataaagcatccatagcagataccattataaccctaatcgaagataatcccgaagctaaagaatctggtttggcgcatctttgcgagttcattgaagactgtgaacatgtttctttggctgtgagaatcttgcatttgttaggaaaggaaggacccaagaccaaacaaccatcgagatacatccgttttatctacaatcgcgtcatattggaatgtccttctgtaagagctgctgcagtc

SEQ ID NO: 1310 - DNA, 364 bp, Diabrotica virgifera
cctcttgtcccgatttgttagaaaatatccaaatattactttcgaggtgtcagatggattcagacgatgaagttagggacagagctacatattatagtaatatacttaacaaaaatgataaaagtttatacaacaattacattttggattctttgcaggtttcaattccttcactagaaagatcgcttagagaatacattcaaaatccaactgacgaaccatttgacattaagtccgtacctgtagcagcagtgccaacagcagaagaacgagaagttaaaaacaaatctgaaggactgctagtctctcaaggtccagtccgacctcctccggtgtctagagaagaaaacttcgccgaaaaact

SEQ ID NO: 1311 - DNA, 375 bp, Diabrotica virgifera
aacgttccgggtatacaacagttaggacctttgttcaaaacttccgacgtcgttgaactcactgaatctgaaacagagtattttgtccgctgtatcaagcactgtttcaaacatcacatcgtcctccaattcgattgtctgaataccttgccagaccagcttttagaaaacgttagagtggagatagacgccggtgaaaccttcgaaattttggcagaaataccttgtgaaaagttgcactataacgaaaccggtaccacatatgtagtagttaagttgcctgatgatgatctccccaactctgttggtacgtgtggagccgtgttgaagttcttagtgaaagattgtgatccatcaacgggaataccagattct

SEQ ID NO: 1312 - DNA, 353 bp, Diabrotica virgifera
cactggaagacatcgaaataacattaggggaccaaattcaaaaagtaagcaaagtaaattgggctgcagcctgggaagaagctgcagctacttatgtagaaaaagaggatacatactccttgaccatcaatacgctaagtggcgctgttaagaatattattcagttcttgggattacagcctgcggaaaggactgacagagtaccggagggtaaatctacgcacacattacttcttgctggtgtattcaggggaggtattgacatactagtaagagcgaaactagctttgggcgaatgtgttacgatgcaactaacagtcaggtcgccagatcctgacgttgctgagcttata

SEQ ID NO: 1313 - DNA, 190 bp, Diabrotica virgifera
gcagctgctataagagcattatgcagtattactgatgctactatgcttcaagctatagaacgttatatgaagcaagctattgtagatagaaacgcagctgtcagttcagcagcactaattagttcattacatatgagcaaattagctccagatgtagtaaaaagatgggtaaatgaagctcaggaagcag

SEQ ID NO: 1314 - DNA, 169 bp, Diabrotica virgifera
gtgataatgcaatggtacagtatcacgcattaggtcttctataccatattaggaagactgataagctagcagtgacaaaattgatttccaagctgaattcaatgggtttaaagagcccttatgctttgtgtatgttgataagaatcactgcaaaacttttagaagaaga

SEQ ID NO: 1315 - DNA, 180 bp, Diabrotica virgifera
ggaccaagagtcactcctcaactccccatatacaataatatttacaatgggcttaaggaacaaatctgaaatggtggtgtatgaagctgcacatgccatggttaacctgaagttcacgagtagtaatgtgctagcacccgctataagtgttctacaactattttgtggatctcctaaagc

SEQ ID NO: 1316 - DNA, 192 bp, Diabrotica virgifera
cacactcagatttgctgctgttagaactttaaatcaagtggccaccacccaccctgcgtcagtgacagcttgtaatttggatctagaaaatttgattactgatcctaataggtcaattgctacactggccattactactcttttgaaaacaggtgccgaatcttctgttgacagactaatgaaacaaatcgc

SEQ ID NO: 1317 - DNA, 180 bp, Diabrotica virgifera
cagtgatgaatttaaagtggttgtcattcaggcaattaaggtattagctttgaaatttccaaggaaacatagcacgcttatgaatttcctatccgccatgttaagagatgagggaggtttagaatataaagcatccatagcagataccattataaccctaatcgaagataatcccgaagc

SEQ ID NO: 1318 - DNA, 180 bp, Diabrotica virgifera
gaatctggtttggcgcatctttgcgagttcattgaagactgtgaacatgtttctttggctgtgagaatcttgcatttgttaggaaaggaaggacccaagaccaaacaaccatcgagatacatccgttttatctacaatcgcgtcatattggaatgtccttctgtaagagctgctgcagtc

SEQ ID NO: 1319 - DNA, 181 bp, Diabrotica virgifera
cctcttgtcccgatttgttagaaaatatccaaatattactttcgaggtgtcagatggattcagacgatgaagttagggacagagctacatattatagtaatatacttaacaaaaatgataaaagtttatacaacaattacattttggattctttgcaggtttcaattccttcactagaaag

SEQ ID NO: 1320 - DNA, 182 bp, Diabrotica virgifera
atcgcttagagaatacattcaaaatccaactgacgaaccatttgacattaagtccgtacctgtagcagcagtgccaacagcagaagaacgagaagttaaaaacaaatctgaaggactgctagtctctcaaggtccagtccgacctcctccggtgtctagagaagaaaacttcgccgaaaaac

SEQ ID NO: 1321 - DNA, 181 bp, Diabrotica virgifera
cgttccgggtatacaacagttaggacctttgttcaaaacttccgacgtcgttgaactcactgaatctgaaacagagtattttgtccgctgtatcaagcactgtttcaaacatcacatcgtcctccaattcgattgtctgaataccttgccagaccagcttttagaaaacgttagagtggag

SEQ ID NO: 1322 - DNA, 188 bp, Diabrotica virgifera
gacgccggtgaaaccttcgaaattttggcagaaataccttgtgaaaagttgcactataacgaaaccggtaccacatatgtagtagttaagttgcctgatgatgatctccccaactctgttggtacgtgtggagccgtgttgaagttcttagtgaaagattgtgatccatcaacgggaataccagattc

SEQ ID NO: 1323 - DNA, 172 bp, Diabrotica virgifera
cactggaagacatcgaaataacattaggggaccaaattcaaaaagtaagcaaagtaaattgggctgcagcctgggaagaagctgcagctacttatgtagaaaaagaggatacatactccttgaccatcaatacgctaagtggcgctgttaagaatattattcagttcttggg

SEQ ID NO: 1324 - DNA, 177 bp, Diabrotica virgifera
cagcctgcggaaaggactgacagagtaccggagggtaaatctacgcacacattacttcttgctggtgtattcaggggaggtattgacatactagtaagagcgaaactagctttgggcgaatgtgttacgatgcaactaacagtcaggtcgccagatcctgacgttgctgagcttata

SEQ ID NO: 1325 - DNA, 876 bp, Diabrotica virgifera
tcgtacaacattgttccaccatgaatatccatggatagtttccgcatctgatgatcaaactatcaggatctggaattggcagagcagaacttgcatttgtgttttaactggacacaatcactatgttatgtgtgtaagttttcatccttctgaagatttgctggtgtcagcttcattggattccactgtcagagtttgggacatttcaggcttaagaaagaaaaatgtagctccaggtccagcaggactagaggaacatttgaagaatccaggagcaactgatctttttggtcaagcagatgcagttgtaaaacatgtgttagagggtcatgatagaggtgtaaactgggcatctttccatcctagctagctaagaattcgatatcaggtccgccttgtttctcctctgtctcttgatctgactaatcttggtttatgatcttgatgatttagcttgactatgcgattgctttcctggacccgtgcagctgcccatcgacccttagctagctaggatggaaagatgcccagtttacacctctatcatgaccctctaacacatgttttacaactgcatctgcttgaccaaaaagatcagttgctcctggattcttcaaatgttcctctagtcctgctggacctggagctacatttttctttcttaagcctgaaatgtcccaaactctgacagtggaatccaatgaagctgacaccagcaaatcttcagaaggatgaaaacttacacacataacatagtgattgtgtccagttaaaacacaaatgcaagttctgctctgccaattccagatcctgatagtttgatcatcagatgcggaaactatccatggatattcatggtggaacaatgttgtacga

SEQ ID NO: 1326 - DNA, 918 bp, Diabrotica virgifera
ctggtgctgatgacagacaagtaaaattatggagaatgaatgattctaaagcatgggaagttgatacatgccgaggccactggcataatgtttcttgtgttttattccatcctagacaggaactgattctctcaaacagtgaagataaaactattagagtttgggatacaactaaaagaacttgcctacatacatttaaaagggaaaatgaaagattctggataatggcatcacatccaaacctcaacttgtttgctgctggacatgatggtggaatggttatattcaagcttgagcgtgaacgtccagcttacacagtacatggcaacctcctgtattatgttaaagaacgttacttacgaaaacttgattttaccacatctctagctagctaagaattcgatatcaggtccgccttgtttctcctctgtctcttgatctgactaatcttggtttatgatcttgatgatttagcttgactatgcgattgctttcctggacccgtgcagctgcccatcgacccctagctagctaaagatgtggtaaaatcaagttttcgtaagtaacgttctttaacataatacaggaggttgccatgtactgtgtaagctggacgttcacgctcaagcttgaatataaccattccaccatcatgtccagcagcaaacaagttgaggtttggatgtgatgccattatccagaatctttcattttcccttttaaatgtatgtaggcaagttcttttagttgtatcccaaactctaatagttttatcttcactgtttgagagaatcagttcctgtctaggatggaataaaacacaagaaacattatgccagtggcctcggcatgtatcaacttcccatgctttagaatcattcattctccataattttacttgtctgtcatcagcaccag

SEQ ID NO: 1327 - DNA, 882 bp, Diabrotica virgifera
gcagctgctataagagcattatgcagtattactgatgctactatgcttcaagctatagaacgttatatgaagcaagctattgtagatagaaacgcagctgtcagttcagcagcactaattagttcattacatatgagcaaattagctccagatgtagtaaaaagatgggtaaatgaagctcaggaagcagtaaatagtgataatgcaatggtacagtatcacgcattaggtcttctataccatattaggaagactgataagctagcagtgacaaaattgatttccaagctgaattcaatgggtttaaagagcccttatgctttgtgtatgttgataagaatcactgcaaaacttttagaagaagactagctagctaaaagcttgatatcaggtccgccttgtttctcctctgtctcttgatctgactaatcttggtttatgatcttgatgatttagcttgactatgcgattgctttcctggacccgtgcagctgcccatcgacccttagctagctagtcttcttctaaaagttttgcagtgattcttatcaacatacacaaagcataagggctctttaaacccattgaattcagcttggaaatcaattttgtcactgctagcttatcagtcttcctaatatggtatagaagacctaatgcgtgatactgtaccattgcattatcactatttactgcttcctgagcttcatttacccatctttttactacatctggagctaatttgctcatatgtaatgaactaattagtgctgctgaactgacagctgcgtttctatctacaatagcttgcttcatataacgttctatagcttgaagcatagtagcatcagtaatactgcataatgctcttatagcagctgc

SEQ ID NO: 1328 - DNA, 896 bp, Diabrotica virgifera
ggaccaagagtcactcctcaactccccatatacaataatatttacaatgggcttaaggaacaaatctgaaatggtggtgtatgaagctgcacatgccatggttaacctgaagttcacgagtagtaatgtgctagcacccgctataagtgttctacaactattttgtggatctcctaaagccacactcagatttgctgctgttagaactttaaatcaagtggccaccacccaccctgcgtcagtgacagcttgtaatttggatctagaaaatttgattactgatcctaataggtcaattgctacactggccattactactcttttgaaaacaggtgccgaatcttctgttgacagactaatgaaacaaatcgcctagctagctaagaattcgatatcaggtccgccttgtttctcctctgtctcttgatctgactaatcttggtttatgatcttgatgatttagcttgactatgcgattgctttcctggacccgtgcagctgcccatcgacccttagctagctaggcgatttgtttcattagtctgtcaacagaagattcggcacctgttttcaaaagagtagtaatggccagtgtagcaattgacctattaggatcagtaatcaaattttctagatccaaattacaagctgtcactgacgcagggtgggtggtggccacttgatttaaagttctaacagcagcaaatctgagtgtggctttaggagatccacaaaatagttgtagaacacttatagcgggtgctagcacattactactcgtgaacttcaggttaaccatggcatgtgcagcttcatacaccaccatttcagatttgttccttaagcccattgtaaatattattgtatatggggagttgaggagtgactcttggtcc

SEQ ID NO: 1329 - DNA, 882 bp, Diabrotica virgifera
tcagtgatgaatttaaagtggttgtcattcaggcaattaaggtattagctttgaaatttccaaggaaacatagcacgcttatgaatttcctatccgccatgttaagagatgagggaggtttagaatataaagcatccatagcagataccattataaccctaatcgaagataatcccgaagctaaagaatctggtttggcgcatctttgcgagttcattgaagactgtgaacatgtttctttggctgtgagaatcttgcatttgttaggaaaggaaggacccaagaccaaacaaccatcgagatacatccgttttatctacaatcgcgtcatattggaatgtccttctgtaagagctgctgcagtcctagctagctaagaattcgatatcaggtccgccttgtttctcctctgtctcttgatctgactaatcttggtttatgatcttgatgatttagcttgactatgcgattgctttcctggacccgtgcagctgcccatcgacccttagctagctaggactgcagcagctcttacagaaggacattccaatatgacgcgattgtagataaaacggatgtatctcgatggttgtttggtcttgggtccttcctttcctaacaaatgcaagattctcacagccaaagaaacatgttcacagtcttcaatgaactcgcaaagatgcgccaaaccagattctttagcttcgggattatcttcgattagggttataatggtatctgctatggatgctttatattctaaacctccctcatctcttaacatggcggataggaaattcataagcgtgctatgtttccttggaaatttcaaagctaataccttaattgcctgaatgacaaccactttaaattcatcactga

SEQ ID NO: 1330 - DNA, 880 bp, Diabrotica virgifera
cctcttgtcccgatttgttagaaaatatccaaatattactttcgaggtgtcagatggattcagacgatgaagttagggacagagctacatattatagtaatatacttaacaaaaatgataaaagtttatacaacaattacattttggattctttgcaggtttcaattccttcactagaaagatcgcttagagaatacattcaaaatccaactgacgaaccatttgacattaagtccgtacctgtagcagcagtgccaacagcagaagaacgagaagttaaaaacaaatctgaaggactgctagtctctcaaggtccagtccgacctcctccggtgtctagagaagaaaacttcgccgaaaaactttagctagctaggaattcgatatcaggtccgccttgtttctcctctgtctcttgatctgactaatcttggtttatgatcttgatgatttagcttgactatgcgattgctttcctggacccgtgcagctgcccatcgacccttagctagctagagtttttcggcgaagttttcttctctagacaccggaggaggtcggactggaccttgagagactagcagtccttcagatttgtttttaacttctcgttcttctgctgttggcactgctgctacaggtacggacttaatgtcaaatggttcgtcagttggattttgaatgtattctctaagcgatctttctagtgaaggaattgaaacctgcaaagaatccaaaatgtaattgttgtataaacttttatcatttttgttaagtatattactataatatgtagctctgtccctaacttcatcgtctgaatccatctgacacctcgaaagtaatatttggatattttctaacaaatcgggacaagagg

SEQ ID NO: 1331 - DNA, 902 bp, Diabrotica virgifera
aacgttccgggtatacaacagttaggacctttgttcaaaacttccgacgtcgttgaactcactgaatctgaaacagagtattttgtccgctgtatcaagcactgtttcaaacatcacatcgtcctccaattcgattgtctgaataccttgccagaccagcttttagaaaacgttagagtggagatagacgccggtgaaaccttcgaaattttggcagaaataccttgtgaaaagttgcactataacgaaaccggtaccacatatgtagtagttaagttgcctgatgatgatctccccaactctgttggtacgtgtggagccgtgttgaagttcttagtgaaagattgtgatccatcaacgggaataccagattctttagctagctaggaattcgatatcaggtccgccttgtttctcctctgtctcttgatctgactaatcttggtttatgatcttgatgatttagcttgactatgcgattgctttcctggacccgtgcagctgcccatcgacccttagctagctagagaatctggtattcccgttgatggatcacaatctttcactaagaacttcaacacggctccacacgtaccaacagagttggggagatcatcatcaggcaacttaactactacatatgtggtaccggtttcgttatagtgcaacttttcacaaggtatttctgccaaaatttcgaaggtttcaccggcgtctatctccactctaacgttttctaaaagctggtctggcaaggtattcagacaatcgaattggaggacgatgtgatgtttgaaacagtgcttgatacagcggacaaaatactctgtttcagattcagtgagttcaacgacgtcggaagttttgaacaaaggtcctaactgttgtatacccggaacgtt

SEQ ID NO: 1332 - DNA, 858 bp, Diabrotica virgifera
cactggaagacatcgaaataacattaggggaccaaattcaaaaagtaagcaaagtaaattgggctgcagcctgggaagaagctgcagctacttatgtagaaaaagaggatacatactccttgaccatcaatacgctaagtggcgctgttaagaatattattcagttcttgggattacagcctgcggaaaggactgacagagtaccggagggtaaatctacgcacacattacttcttgctggtgtattcaggggaggtattgacatactagtaagagcgaaactagctttgggcgaatgtgttacgatgcaactaacagtcaggtcgccagatcctgacgttgctgagcttatactagctagctaagaattcgatatcaggtccgccttgtttctcctctgtctcttgatctgactaatcttggtttatgatcttgatgatttagcttgactatgcgattgctttcctggacccgtgcagctgcccatcgacccttagctagctagtataagctcagcaacgtcaggatctggcgacctgactgttagttgcatcgtaacacattcgcccaaagctagtttcgctcttactagtatgtcaatacctcccctgaatacaccagcaagaagtaatgtgtgcgtagatttaccctccggtactctgtcagtcctttccgcaggctgtaatcccaagaactgaataatattcttaacagcgccacttagcgtattgatggtcaaggagtatgtatcctctttttctacataagtagctgcagcttcttcccaggctgcagcccaatttactttgcttactttttgaatttggtcccctaatgttatttcgatgtcttccagtg

SEQ ID NO: 1333 - DNA, 530 bp, Diabrotica virgifera
ctggtgctgatgacagacaagtaaaattatggagaatgaatgattctaaagcatgggaagttgatacatgccgaggccactggcataatgtttcttgtgttttattccatcctagacaggaactgattctctcaaacagtgaagataaaactattagagtttgggatacaactaaaagaacttgcctacctagctagctaagaattcgatatcaggtccgccttgtttctcctctgtctcttgatctgactaatcttggtttatgatcttgatgatttagcttgactatgcgattgctttcctggacccgtgcagctgcccatcgacccttagctagctaggtaggcaagttcttttagttgtatcccaaactctaatagttttatcttcactgtttgagagaatcagttcctgtctaggatggaataaaacacaagaaacattatgccagtggcctcggcatgtatcaacttcccatgctttagaatcattcattctccataattttacttgtctgtcatcagcaccag

SEQ ID NO: 1334 - DNA, 512 bp, Diabrotica virgifera
gaatctggtttggcgcatctttgcgagttcattgaagactgtgaacatgtttctttggctgtgagaatcttgcatttgttaggaaaggaaggacccaagaccaaacaaccatcgagatacatccgttttatctacaatcgcgtcatattggaatgtccttctgtaagagctgctgcagtcctagctagctaagaattcgatatcaggtccgccttgtttctcctctgtctcttgatctgactaatcttggtttatgatcttgatgatttagcttgactatgcgattgctttcctggacccgtgcagctgcccatcgacccttagctagctaggactgcagcagctcttacagaaggacattccaatatgacgcgattgtagataaaacggatgtatctcgatggttgtttggtcttgggtccttcctttcctaacaaatgcaagattctcacagccaaagaaacatgttcacagtcttcaatgaactcgcaaagatgcgccaaaccagattc

SEQ ID NO: 1335 - DNA, 528 bp, Diabrotica virgifera
gacgccggtgaaaccttcgaaattttggcagaaataccttgtgaaaagttgcactataacgaaaccggtaccacatatgtagtagttaagttgcctgatgatgatctccccaactctgttggtacgtgtggagccgtgttgaagttcttagtgaaagattgtgatccatcaacgggaataccagattcctagctagctaagaattcgatatcaggtccgccttgtttctcctctgtctcttgatctgactaatcttggtttatgatcttgatgatttagcttgactatgcgattgctttcctggacccgtgcagctgcccatcgacccttagctagctaggaatctggtattcccgttgatggatcacaatctttcactaagaacttcaacacggctccacacgtaccaacagagttggggagatcatcatcaggcaacttaactactacatatgtggtaccggtttcgttatagtgcaacttttcacaaggtatttctgccaaaatttcgaaggtttcaccggcgtc

SEQ ID NO: 1336 - DNA, 496 bp, Diabrotica virgifera
cactggaagacatcgaaataacattaggggaccaaattcaaaaagtaagcaaagtaaattgggctgcagcctgggaagaagctgcagctacttatgtagaaaaagaggatacatactccttgaccatcaatacgctaagtggcgctgttaagaatattattcagttcttgggctagctagctaagaattcgatatcaggtccgccttgtttctcctctgtctcttgatctgactaatcttggtttatgatcttgatgatttagcttgactatgcgattgctttcctggacccgtgcagctgcccatcgacccttagctagctagcccaagaactgaataatattcttaacagcgccacttagcgtattgatggtcaaggagtatgtatcctctttttctacataagtagctgcagcttcttcccaggctgcagcccaatttactttgcttactttttgaatttggtcccctaatgttatttcgatgtcttccagtg

SEQ ID NO: 1337 - DNA, 1786 bp, Diabrotica virgifera
caccggcttacgtaataattaatttattcctttcatttgcaccatactatatattatttattgagtggacaaatgttaaaaagtaagtctggcagcgaacgtgttaatgaaacctagtaaaaggctccaacatttgacacttcttcatgcaacatgttctgttctgtgtcaatctaacctaacctaacattttcaaatacgaatatggaaacatttcaccacatcaacacgtgaattaatattcgaaaatggagtacgaaaatacacaacaaaatataaacttcgtaccgtgtgtaagatgggttaaacgaggagtggccaattcaagcccagtaaaattgcaactgtcgaaaaacgagctggctcaaattattaatgacaccaagattaaattacaagaatccaatgaaaatgaagatgagcctatggaagaaggtgaaacgtctcaaacagatgagtttgccttagaggattacgataaagaagacgaaaatgaggacactgcaaatgctttaggaattggatcattggcagaactcgataatgatgctgcagacaatttttctgagtcagacgattctgaaaaagaagatgataaaatcaaaccatctgacaatctcatactagtaggacatgtagaaggggatgcaagtctattggaagtctacatatacaatgaacaagaagagtcattgtatgttcatcatgatattatgttatcatcctttcctctgtgtttagaaccgctaaactatgaaccgaagatgcccaaaggaaattattgtgcagtgggatcaatgtcacctgttatagaggtctgggatgtagatattatgaatgttattgaaccttcatttactttagggagacctgctagtaaaaagaagaacaaggaacatataggccatacggatgcagtgctttcattagcttggaacaaaacctttgaacatgtgttggctagtggatctgtagatcaaacaatacacttgtgggatatggaaatcaaaaaaccaagtacaaccattaaatccttccaagaaaaagttcaatgtctcgaatggcatcctttagaggcacaaacacttttaggtggaggttgtgacaaatctgcaagagtatttgatggcaggacccctgaaacccaccaaacttggctacttgatggagaagctgaaaggctatgctggaacccattagaacctttcacatttttagcaggtaccagcagtgggtctgtacagtgtttcgactgtagaaaaggacagctatggtcagttaaagcacacagcaaggaagtaacagggttagtccttagcaaacaatgccaaggattgttgattacttcttctacagatgaaacagttaaaatttgggacttggctacactggaagctgaacctaagcttgttaatgaaaaggagtttaatatggggaatattcactgtttggatttatgtccagacttgccgtttgttatatctgtaggtggagataagaagtcaaataattttactgtttttgatgtacagaatattgatgttgttaaacacacatttgggccaagaggattggtacagctagttccagatacagaagaaaatactaatacgttttattgtttaataaagtttttattttatttatttgtaataatttcatgcttcttctttaagtaccgtgcccaaatattagtcattggtagattccttgacaatttgccgatactgttttcgattactgaacaattcatcttctgatgagccagtccattgacaaaggtttc

SEQ ID NO: 1338 - DNA, 3948 bp, Diabrotica virgifera
  misc_feature (3773)..(3795): n is a, c, g, or t
tggttcttaccaacttccagacatttttttttggtggttaaggcccatctaaaatgcccaaatcaaataaatctagaaatgcgttttactactttatggaggattttaaacaaagacaaggatttgcttgtaaatcgatgaaggatgtagcagatgctgcaggtccccattgggctaggatgtctaaagcagaaagaagaccttatgaagagagggcaaacaaagagaagggaggtttgagatatacttgggatggtcaatgcgttgaagatatagaaaggaggaacaaagctgaggacaataaaattgctaagatgaaagatgatatcgactgcaccttgaaatttgccaaagaaaattgtcgactccgagatgaaatgttcttcataatccatatcaatactttctgttaccatgccagtggtgatcggtattatcccgctgaaattgccatttcatgcttcagcttggaggatggcgttttgcctcaaaatgtgtttcataaaattattaagccaggtagactaccactggggtatgctagtgacgcaaaaaagcaatctgaagattcacatcaactgcctatccccttaactggtgacgacgacgacaatgtggaagaagtttatacagagatgaaagaatttatattatctaaaaccggagatactaagaaattccctcccttgtatgctaagaaagatattgttaaaatgttgcaacatgtgttagacacttggtgcgctgattttgatgagccgccattatttaaagtttattatttacaatatatgtttcaagtattaaaaaactcggtagctaacgataacgtatggcccttatattcaatggcagaaacggaactggataaggatctttattcccatactgttggaatatgttgtgaattccattctgttagtgaagcttgtcaattttgcagcaagtcagtggcagtacgacttgcatacacaatttgtgataattgctgttcgttcctagatattcctatagagcctggaagacacgtacctgatcaagcttttacagcatccagtttgagctcaagagcttcatcaaaagctagtttgtatacaggttccagtaaatcttctaagaagcagtcagttcgtgaagatgacaaagacactgttttatcgttttctagtgcctctcagtgggagagcgaatctgtagtgtcagactcctctacagctactttcaataatagctttccaggtctgaaatcgaaatggacattaagcaattctcaacctgtagaaactgactcaatgagccaaatgtcaggtcagagctatgcaagtgctatgggaactagaagacagttttctagtgcaatgggaaatagaggatctcaaagagagtcctctaacaattccaacaatggtgacactagtgattcgaataccgattattttaacagtcaatcatttccggctcttggaaggggaagaggtatggccagaaatcgaagaaattgatcatttttgactgcaatgggtcttgttccacttcatgagattgttaaatgagtatgtaactgattacattaggcgacaatattttttttagtgtcagattatttgatgtaattgtccttttgacaattctttaatcattgatgttttcttctattgtggtgtttttagatgtcatatttttatgtatgtaaattggttttttatctaagtatagaatattacattttagtttaataagataccagtaaagtatattggtttaccagtcgcctaatgtaaactagtatatacatacctatattatttttctttaatagttttaagtcaattttgatacagatcacgagacagatattttttccgtctagtccgaattgcgttccgtttcttgggccttgtcgaattgcgtcccaaatattttgcttacctggccaccgataacgtctagtccgaattgcgtttcatttcttaattagccaacccaattgcggtcagaagatagcttaataaatattagttaagcagggaaatacaatcaacgtaatatcaactaacagtttatttttattttagcaccgaatttataactaacacatttaacgaaattgtatcttgaaatttcacccctgttatactggttaattttctgttcgagaaaaatatatttgctggaggtagctttatctacatttctagaaatattttgtttaacagaatttatttttatataagaatcggtttgaatgcgctttaatgtttcaacaaacaaaaaaatattaggatgtggagacaaacaataatttttaaattttgaatgaaatcactcacaagaattagttgttctatatatagatgcgctattctttgcccaaatttgtggaggaaatgtgtagtcctcttcgatatacctttcaactagatagtttgcaaatgcgtcaactcgatgatcatctggtttttcaggcataaaatcttccacaaaacaatctccaacttggctcggaggaagatacattaggccaaaaatatgcttcagccatttacctatttctgagttctcgttcttatactcagaactcaaccccatattttgtactttacgccacctgtaacaagattatagaataaattctttatttcagaaagtacttgcattcaagaaaaagtttgaaacaggtcagattttataaaaaaaatacatctttaaaaaataatgagaatatttaggagccaattttttgacagaggttatgacgacatcttttttttatgtcaaaaatttgaagatattttacctacaattcttgttttaacttatatcaaatgctgttttttgtaaaaaaaaattgaaaaaagaaattacagtgaagtttgaaataaacatattgaaatgtttagttttacagcaaaaaaaataggatgacgtcataactcaagtttttcttaacaatctactatttgccagttacattgccatacgtattacttaccaagcttgagcaagatgaagtcgataaccaacaacatttgcttccggaaaaacttctcgtacgctggagtggatacctaattcgtaatcaatcactattttcgttggatttaaattgcatcccaaatcttgacattttttctttaataattcgaataatgatttgtaagtgaatttttgcttattaggtaacaaacaaaatgcaaccggaacataagtgtcattaatcaatgtatgtaatgtaaacatttaaaaaaaaattgtgcaataatcgaatgttccatccataaataaagtggaattgttacacataaatgaaagattagacattcatgaaaaaacaaaaatattaaactgttcatcattaatcaacaaaaactgttcatttttgatagtaaatatttcaatttgttccaaaaattcttgaacatccttggctgattttggcaattttggaaccgttttcaatcgcgtgcgattaatgttctttttttatgtattggacatcttttgttgacagagaggtaagtacttcgctttgcttttcgatttccttgtgtaacaacttcgcaggtcgttccgcaatatcttctgttgcttttcttttaagagaattgttaactttctggcgaattaatacttcttcagcaagctcatgattgtgttcaccactaacttttgaaaacacattatttaatgtatatagttttgctttacactttttgaagttatacttctttaggcgcgattgagtaattatttattattaatctgcgcgcatnnnnnnnnnnnnnnnnnnnnnnnggttgctaatctttcaaattatgtatcagcgcaaataagccattaaaataatatattagtgttttttagtaaatgtattatttattatcatttttgtgtctttggatttgttttcctttggcgtaaaataataaaatatctatttttatattt

SEQ ID NO: 1339 - DNA, 155 bp, Diabrotica virgifera
cgattctgaaaaagaagatgataaaatcaaaccatctgacaatctcatactagtaggacatgtagaaggggatgcaagtctattggaagtctacatatacaatgaacaagaagagtcattgtatgttcatcatgatattatgttatcatcctttc

SEQ ID NO: 1340 - DNA, 155 bp, Diabrotica virgifera
atggaggattttaaacaaagacaaggatttgcttgtaaatcgatgaaggatgtagcagatgctgcaggtccccattgggctaggatgtctaaagcagaaagaagaccttatgaagagagggcaaacaaagagaagggaggtttgagatatacttg

SEQ ID NO: 1341 - DNA, 2465 bp, Diabrotica virgifera
cgtttagtagtacatagagaaatcgcttttagttttaatcttttctgtgttggaatattgaacaaattctaatgattcgtaaaataacacttctgttaaaaaccaaaactgatagtttgttcaaaaaaagtacaatttttctgggcttgctactgaaataatgtgccatactctaattgtggaacaaattgtaggtatatgttgaaagtgaacaaataactaatgcttacaataatgtcgacatcaagtcaaaataatggtaaaaagagttcaagcagctctattgttaacaccccttccagtactcccattaccaatcttgcaaatggtagtagtagtacccaaggaacagcacatagttcacctccacctaataacaatgctccaaagtatggtaccctagtgcctaacagaatattcgtgggaggaatatcagctaacacaacagaaggagaattgatgcaactttttagcaactatggtactgttaaagctgctaaaattatacaggacagggctggtgtgtcaaaaggatatggtttcatcacctttgagagtgaagatgatgctaaaaggcctcttagagaagctgaaaacatagtgctaagagaaagaaaacttaatatagcacccgctattaaaaaacagccttttagtcgagcatttgatgcatccagtccacctgctgttgctgcaaatagtgccagtcaattcttttttcctccgggtgctgccgtgccatattttcagagtggagttacatattatactcagccagctcctgctgcacctggagatcccactgctcaacaacctgtttatcaaccccctccaatgtatcccacgcaaactggtcctccacaggcagctacatacccttctatgatgtttcctgctcaaactatatatatgccgcaacagtatcccatgcctattccgtacgagtacaacttctaccagggtaacggaccgtcgctgccaactcagtatctggccggaggccaaagcggtccgggaaactctcattgcacctcattaccatcatcaaacagtccacccagacccaattgttatggtcaacaggtgcctgcctataattcaggagatcccgtgtactacaacttgccaatatacggagccactttggaaggtccgccattatacgctgatgccttcgatctaagcgctagtggagcttatgcggaggaaacctacagcggcatgattactcaagaaaatgtagaagcttctcttggatcatcggtaaattcaactcgtgcaacttccgataattttacgcaacatatggatcaatctctcgttgagtctgattcaaatattgttaatgttggaggtaaaccaccagcacataaatcttcagagacaattgtttctactccttcccagcctcaggaggagagaaactcacacacgcctattgtttcactactttccatagatcatcaacaggaaaaagactattcatcaatgcaaagcggtcgtagacggaaacttctgattcaaagcaatcaaaataacgtacccatgtatcctacaaacggatacgtcaaccagtttgtcggatataatcctcaacaaccatccccaccttcattcggtccacctctctataacaacggctacggttattctgaatatcgtcgatttaacggatacccagatctcaggtcaaataataatagtaataaaccgaggagacgaatatacgaaaataggcggtcgaacgatcattctagccgttccagtcttcgcacagactcaaactcatcggctagttgtgttgacgaaaataaaaacgaagaaaaaacttttcgaactactgttaacactcctccacctgccccatactcacctatgaccaatcatcaattcaaatttattaattacactaacacgaaaaacgtttataatcataagtacgctcacacgtttataatcataagtacgctaacaacaataattattataatagaacagctacacacaatgaccgatttaaacataccgaacctttagcgaataaaaacaataacagttccatttacccattaacaaataatttcctaaataatagccatacccaaagtaattctgattcccttccctcccaaaattcccaggtacatgtgacgactacgggtcagagcttcgtcccggcggctatccaagctcagacgaaacgcaacaagcgttctttgagaagaagcggtgccagtgccggaggcatcaacgaaatcggcgccggtgacgcccctttaccaggcgaagaatgcgaagatgtctacaagaagctggaaacgcttaagttgtaacgaaaaagtggtatcttttcttgtatatttttttctatttatttaagactgtacaataatgtaaaatactagaaatttaatgtaaactaaagaggaaaaatatataatacatatttattgaagatgaaaaaa

SEQ ID NO: 1342 - DNA, 155 bp, Diabrotica virgifera
gctccaaagtatggtaccctagtgcctaacagaatattcgtgggaggaatatcagctaacacaacagaaggagaattgatgcaactttttagcaactatggtactgttaaagctgctaaaattatacaggacagggctggtgtgtcaaaaggata

SEQ ID NO: 1343 - DNA, 275 bp, Diabrotica virgifera
gctccaaagtatggtaccctagtgcctaacagaatattcgtgggaggaatatcagctaacacaacagaaggagaattgatgcaactttttagcaactatggtactgttaaagctgctaaaattatacaggacagggctggtgtgtcaaaaggatatggtttcatcacctttgagagtgaagatgatgctaaaaggcctcttagagaagctgaaaacatagtgctaagagaaagaaaacttaatatagcacccgctattaaaaaacagccttttag

SEQ ID NO: 1344 - DNA, 275 bp, Diabrotica virgifera
tgccagtcaattcttttttcctccgggtgctgccgtgccatattttcagagtggagttacatattatactcagccagctcctgctgcacctggagatcccactgctcaacaacctgtttatcaaccccctccaatgtatcccacgcaaactggtcctccacaggcagctacatacccttctatgatgtttcctgctcaaactatatatatgccgcaacagtatcccatgcctattccgtacgagtacaacttctaccagggtaacggaccgtcgc

SEQ ID NO: 1345 - DNA, 275 bp, Diabrotica virgifera
ctcagtatctggccggaggccaaagcggtccgggaaactctcattgcacctcattaccatcatcaaacagtccacccagacccaattgttatggtcaacaggtgcctgcctataattcaggagatcccgtgtactacaacttgccaatatacggagccactttggaaggtccgccattatacgctgatgccttcgatctaagcgctagtggagcttatgcggaggaaacctacagcggcatgattactcaagaaaatgtagaagcttctcttgga

SEQ ID NO: 1346 - DNA, 275 bp, Diabrotica virgifera
cggtaaattcaactcgtgcaacttccgataattttacgcaacatatggatcaatctctcgttgagtctgattcaaatattgttaatgttggaggtaaaccaccagcacataaatcttcagagacaattgtttctactccttcccagcctcaggaggagagaaactcacacacgcctattgtttcactactttccatagatcatcaacaggaaaaagactattcatcaatgcaaagcggtcgtagacggaaacttctgattcaaagcaatcaaaat

SEQ ID NO: 1347 - DNA, 275 bp, Diabrotica virgifera
gtacccatgtatcctacaaacggatacgtcaaccagtttgtcggatataatcctcaacaaccatccccaccttcattcggtccacctctctataacaacggctacggttattctgaatatcgtcgatttaacggatacccagatctcaggtcaaataataatagtaataaaccgaggagacgaatatacgaaaataggcggtcgaacgatcattctagccgttccagtcttcgcacagactcaaactcatcggctagttgtgttgacgaaaataa

SEQ ID NO: 1348 - DNA, 275 bp, Diabrotica virgifera
cgaagaaaaaacttttcgaactactgttaacactcctccacctgccccatactcacctatgaccaatcatcaattcaaatttattaattacactaacacgaaaaacgtttataatcataagtacgctcacacgtttataatcataagtacgctaacaacaataattattataatagaacagctacacacaatgaccgatttaaacataccgaacctttagcgaataaaaacaataacagttccatttacccattaacaaataatttcctaaataa

SEQ ID NO: 1349 - DNA, 373 bp, Diabrotica virgifera
tagccatacccaaagtaattctgattcccttccctcccaaaattcccaggtacatgtgacgactacgggtcagagcttcgtcccggcggctatccaagctcagacgaaacgcaacaagcgttctttgagaagaagcggtgccagtgccggaggcatcaacgaaatcggcgccggtgacgcccctttaccaggcgaagaatgcgaagatgtctacaagaagctggaaacgcttaagttgtaacgaaaaagtggtatcttttcttgtatatttttttctatttatttaagactgtacaataatgtaaaatactagaaatttaatgtaaactaaagaggaaaaatatataatacatatttattgaagatgaaaaaa

SEQ ID NO: 1350 - DNA, 381 bp, Diabrotica virgifera
cgtttagtagtacatagagaaatcgcttttagttttaatcttttctgtgttggaatattgaacaaattctaatgattcgtaaaataacacttctgttaaaaaccaaaactgatagtttgttcaaaaaaagtacaatttttctgggcttgctactgaaataatgtgccatactctaattgtggaacaaattgtaggtatatgttgaaagtgaacaaataactaatgcttacaataatgtcgacatcaagtcaaaataatggtaaaaagagttcaagcagctctattgttaacaccccttccagtactcccattaccaatcttgcaaatggtagtagtagtacccaaggaacagcacatagttcacctccacctaataacaat

SEQ ID NO: 1351 - DNA, 271 bp, Diabrotica virgifera
tgcccaaatcaaataaatctagaaatgcgttttactactttatggaggattttaaacaaagacaaggatttgcttgtaaatcgatgaaggatgtagcagatgctgcaggtccccattgggctaggatgtctaaagcagaaagaagaccttatgaagagagggcaaacaaagagaagggaggtttgagatatacttgggatggtcaatgcgttgaagatatagaaaggaggaacaaagctgaggacaataaaattgctaagatgaaagatga

SEQ ID NO: 1352 - DNA, 275 bp, Diabrotica virgifera
cagtgggagagcgaatctgtagtgtcagactcctctacagctactttcaataatagctttccaggtctgaaatcgaaatggacattaagcaattctcaacctgtagaaactgactcaatgagccaaatgtcaggtcagagctatgcaagtgctatgggaactagaagacagttttctagtgcaatgggaaatagaggatctcaaagagagtcctctaacaattccaacaatggtgacactagtgattcgaataccgattattttaacagtcaatc

SEQ ID NO: 1353 - DNA, 500 bp, Diabrotica virgifera
tatcgactgcaccttgaaatttgccaaagaaaattgtcgactccgagatgaaatgttcttcataatccatatcaatactttctgttaccatgccagtggtgatcggtattatcccgctgaaattgccatttcatgcttcagcttggaggatggcgttttgcctcaaaatgtgtttcataaaattattaagccaggtagactaccactggggtatgctagtgacgcaaaaaagcaatctgaagattcacatcaactgcctatccccttaactggtgacgacgacgacaatgtggaagaagtttatacagagatgaaagaatttatattatctaaaaccggagatactaagaaattccctcccttgtatgctaagaaagatattgttaaaatgttgcaacatgtgttagacacttggtgcgctgattttgatgagccgccattatttaaagtttattatttacaatatatgtttcaagtattaaaaaactcggtagctaacg

SEQ ID NO: 1354 - DNA, 350 bp, Diabrotica virgifera
ataacgtatggcccttatattcaatggcagaaacggaactggataaggatctttattcccatactgttggaatatgttgtgaattccattctgttagtgaagcttgtcaattttgcagcaagtcagtggcagtacgacttgcatacacaatttgtgataattgctgttcgttcctagatattcctatagagcctggaagacacgtacctgatcaagcttttacagcatccagtttgagctcaagagcttcatcaaaagctagtttgtatacaggttccagtaaatcttctaagaagcagtcagttcgtgaagatgacaaagacactgttttatcgttttctagtgcctct

SEQ ID NO: 1355 - DNA, 500 bp, Diabrotica virgifera
atttccggctcttggaaggggaagaggtatggccagaaatcgaagaaattgatcatttttgactgcaatgggtcttgttccacttcatgagattgttaaatgagtatgtaactgattacattaggcgacaatattttttttagtgtcagattatttgatgtaattgtccttttgacaattctttaatcattgatgttttcttctattgtggtgtttttagatgtcatatttttatgtatgtaaattggttttttatctaagtatagaatattacattttagtttaataagataccagtaaagtatattggtttaccagtcgcctaatgtaaactagtatatacatacctatattatttttctttaatagttttaagtcaattttgatacagatcacgagacagatattttttccgtctagtccgaattgcgttccgtttcttgggccttgtcgaattgcgtcccaaatattttgcttacctggccaccgataacgtctag

SEQ ID NO: 1356 - DNA, 500 bp, Diabrotica virgifera
tccgaattgcgtttcatttcttaattagccaacccaattgcggtcagaagatagcttaataaatattagttaagcagggaaatacaatcaacgtaatatcaactaacagtttatttttattttagcaccgaatttataactaacacatttaacgaaattgtatcttgaaatttcacccctgttatactggttaattttctgttcgagaaaaatatatttgctggaggtagctttatctacatttctagaaatattttgtttaacagaatttatttttatataagaatcggtttgaatgcgctttaatgtttcaacaaacaaaaaaatattaggatgtggagacaaacaataatttttaaattttgaatgaaatcactcacaagaattagttgttctatatatagatgcgctattctttgcccaaatttgtggaggaaatgtgtagtcctcttcgatatacctttcaactagatagtttgcaaatgcgtcaactcgatgat

SEQ ID NO: 1357 - DNA, 500 bp, Diabrotica virgifera
catctggtttttcaggcataaaatcttccacaaaacaatctccaacttggctcggaggaagatacattaggccaaaaatatgcttcagccatttacctatttctgagttctcgttcttatactcagaactcaaccccatattttgtactttacgccacctgtaacaagattatagaataaattctttatttcagaaagtacttgcattcaagaaaaagtttgaaacaggtcagattttataaaaaaaatacatctttaaaaaataatgagaatatttaggagccaattttttgacagaggttatgacgacatcttttttttatgtcaaaaatttgaagatattttacctacaattcttgttttaacttatatcaaatgctgttttttgtaaaaaaaaattgaaaaaagaaattacagtgaagtttgaaataaacatattgaaatgtttagttttacagcaaaaaaaataggatgacgtcataactcaagtttttcttaac

SEQ ID NO: 1358 - DNA, 500 bp, Diabrotica virgifera
aatctactatttgccagttacattgccatacgtattacttaccaagcttgagcaagatgaagtcgataaccaacaacatttgcttccggaaaaacttctcgtacgctggagtggatacctaattcgtaatcaatcactattttcgttggatttaaattgcatcccaaatcttgacattttttctttaataattcgaataatgatttgtaagtgaatttttgcttattaggtaacaaacaaaatgcaaccggaacataagtgtcattaatcaatgtatgtaatgtaaacatttaaaaaaaaattgtgcaataatcgaatgttccatccataaataaagtggaattgttacacataaatgaaagattagacattcatgaaaaaacaaaaatattaaactgttcatcattaatcaacaaaaactgttcatttttgatagtaaatatttcaatttgttccaaaaattcttgaacatccttggctgattttggcaattttggaac

SEQ ID NO: 1359 - DNA, 322 bp, Diabrotica virgifera
cgttttcaatcgcgtgcgattaatgttctttttttatgtattggacatcttttgttgacagagaggtaagtacttcgctttgcttttcgatttccttgtgtaacaacttcgcaggtcgttccgcaatatcttctgttgcttttcttttaagagaattgttaactttctggcgaattaatacttcttcagcaagctcatgattgtgttcaccactaacttttgaaaacacattatttaatgtatatagttttgctttacactttttgaagttatacttctttaggcgcgattgagtaattatttattattaatctgcgcgcat

SEQ ID NO: 1360 - DNA, 272 bp, Diabrotica virgifera
tggagtacgaaaatacacaacaaaatataaacttcgtaccgtgtgtaagatgggttaaacgaggagtggccaattcaagcccagtaaaattgcaactgtcgaaaaacgagctggctcaaattattaatgacaccaagattaaattacaagaatccaatgaaaatgaagatgagcctatggaagaaggtgaaacgtctcaaacagatgagtttgccttagaggattacgataaagaagacgaaaatgaggacactgcaaatgctttaggaatt

SEQ ID NO: 1361 - DNA, 275 bp, Diabrotica virgifera
tggaaatcaaaaaaccaagtacaaccattaaatccttccaagaaaaagttcaatgtctcgaatggcatcctttagaggcacaaacacttttaggtggaggttgtgacaaatctgcaagagtatttgatggcaggacccctgaaacccaccaaacttggctacttgatggagaagctgaaaggctatgctggaacccattagaacctttcacatttttagcaggtaccagcagtgggtctgtacagtgtttcgactgtagaaaaggacagctatgg

SEQ ID NO: 1362 - DNA, 248 bp, Diabrotica virgifera
caccggcttacgtaataattaatttattcctttcatttgcaccatactatatattatttattgagtggacaaatgttaaaaagtaagtctggcagcgaacgtgttaatgaaacctagtaaaaggctccaacatttgacacttcttcatgcaacatgttctgttctgtgtcaatctaacctaacctaacattttcaaatacgaatatggaaacatttcaccacatcaacacgtgaattaatattcgaaa

SEQ ID NO: 1363 - DNA, 272 bp, Diabrotica virgifera
tcctctgtgtttagaaccgctaaactatgaaccgaagatgcccaaaggaaattattgtgcagtgggatcaatgtcacctgttatagaggtctgggatgtagatattatgaatgttattgaaccttcatttactttagggagacctgctagtaaaaagaagaacaaggaacatataggccatacggatgcagtgctttcattagcttggaacaaaacctttgaacatgtgttggctagtggatctgtagatcaaacaatacacttgtgggata

SEQ ID NO: 1364 - DNA, 486 bp, Diabrotica virgifera
tcagttaaagcacacagcaaggaagtaacagggttagtccttagcaaacaatgccaaggattgttgattacttcttctacagatgaaacagttaaaatttgggacttggctacactggaagctgaacctaagcttgttaatgaaaaggagtttaatatggggaatattcactgtttggatttatgtccagacttgccgtttgttatatctgtaggtggagataagaagtcaaataattttactgtttttgatgtacagaatattgatgttgttaaacacacatttgggccaagaggattggtacagctagttccagatacagaagaaaatactaatacgttttattgtttaataaagtttttattttatttatttgtaataatttcatgcttcttctttaagtaccgtgcccaaatattagtcattggtagattccttgacaatttgccgatactgttttcgattactgaacaattcatcttctga

SEQ ID NO: 1365 - DNA, 400 bp, Diabrotica virgifera
ctaaacgtccctggatcttaactagtcttcacaatggttgtatccaattatgggactaccgtatgtgcaccctcctagagaaatttgatgagcatgatggccctgtaagaggcatttgcttccacaatcaacagcccttatttgtttctggtggtgatgattacaagatcaaagtatggaattacaaacaaaaacgatgcatttttactctattgggtcatttagattatattcgtacaacattgttccaccatgaatatccatggatagtttccgcatctgatgatcaaactatcaggatctggaattggcagagcagaacttgcatttgtgttttaactggacacaatcactatgttatgtgtgtaagttttcatccttctgaagatttgctggtgtc

SEQ ID NO: 1366 - DNA, 551 bp, Diabrotica virgifera
agcttcattggattccactgtcagagtttgggacatttcaggcttaagaaagaaaaatgtagctccaggtccagcaggactagaggaacatttgaagaatccaggagcaactgatctttttggtcaagcagatgcagttgtaaaacatgtgttagagggtcatgatagaggtgtaaactgggcatctttccatccaactctgcctcttattgcctctggtgctgatgacagacaagtaaaattatggagaatgaatgattctaaagcatgggaagttgatacatgccgaggccactggcataatgtttcttgtgttttattccatcctagacaggaactgattctctcaaacagtgaagataaaactattagagtttgggatacaactaaaagaacttgcctacatacatttaaaagggaaaatgaaagattctggataatggcatcacatccaaacctcaacttgtttgctgctggacatgatggtggaatggttatattcaagcttgagcgtgaacgtccagcttacacagtacatggcaacctcctgt

SEQ ID NO: 1367 - DNA, 120 bp, Diabrotica virgifera
ggaaggatgccaatgttaagaaccagttgcctgcttctggcgtgaaattgaatgaactagtcgccaaattacaggcttgctatcaactcactacaggaggcaaattcacggaagccatag

SEQ ID NO: 1368 - DNA, 107 bp, Diabrotica virgifera
aggtgtaaactgggcatctttccatccaactctgcctcttattgcctctggtgctgatgacagacaagtaaaattatggagaatgaatgattctaaagcatgggaag

SEQ ID NO: 1369 - DNA, 110 bp, Diabrotica virgifera
tttattccatcctagacaggaactgattctctcaaacagtgaagataaaactattagagtttgggatacaactaaaagaacttgcctacatacatttaaaagggaaaatg

SEQ ID NO: 1370 - DNA, 303 bp, Diabrotica virgifera
gacatgtacagagcagctgctataagagcattatgcagtattactgatgctactatgcttcaagctatagaacgttatatgaagcaagctattgtagatagaaacgcagctgtcagttcagcagcactaattagttcattacatatgagcaaattagctccagatgtagtaaaaagatgggtaaatgaagctcaggaagcagtaaatagtgataatgcaatggtacagtatcacgcattaggtcttctataccatattaggaagactgataagctagcagtgacaaaattgatttccaagctg

SEQ ID NO: 1371 - DNA, 332 bp, Diabrotica virgifera
gggtttaaagagcccttatgctttgtgtatgttgataagaatcactgcaaaacttttagaagaagaggaccaagagtcactcctcaactccccatatacaataatatttacaatgggcttaaggaacaaatctgaaatggtggtgtatgaagctgcacatgccatggttaacctgaagttcacgagtagtaatgtgctagcacccgctataagtgttctacaactattttgtggatctcctaaagccacactcagatttgctgctgttagaactttaaatcaagtggccaccacccaccctgcgtcagtgacagcttgtaatttggatctag

SEQ ID NO: 1372 - DNA, 530 bp, Diabrotica virgifera
gtggttgtcattcaggcaattaaggtattagctttgaaatttccaaggaaacatagcacgcttatgaatttcctatccgccatgttaagagatgagggaggtttagaatataaagcatccatagcagataccattataaccctaatcgaagataatcccgaagctaaagaatctggtttggcgcatctttgcgagttcattgaagactgtgaacatgtttctttggctgtgagaatcttgcatttgttaggaaaggaaggacccaagaccaaacaaccatcgagatacatccgttttatctacaatcgcgtcatattggaatgtccttctgtaagagctgctgcagtctccgccatggcacaattcggagcctcttgtcccgatttgttagaaaatatccaaatattactttcgaggtgtcagatggattcagacgatgaagttagggacagagctacatattatagtaatatacttaacaaaaatgataaaagtttatacaacaattacattttggattctttgcaggt

SEQ ID NO: 1373 - DNA, 108 bp, Diabrotica virgifera
aatgcaatggtacagtatcacgcattaggtcttctataccatattaggaagactgataagctagcagtgacaaaattgatttccaagctgaattcaatgggtttaaag

SEQ ID NO: 1374 - DNA, 140 bp, Diabrotica virgifera
atgggcttaaggaacaaatctgaaatggtggtgtatgaagctgcacatgccatggttaacctgaagttcacgagtagtaatgtgctagcacccgctataagtgttctacaactattttgtggatctcctaaagccacact

SEQ ID NO: 1375 - DNA, 110 bp, Diabrotica virgifera
cgacctcctccggtgtctagagaagaaaacttcgccgaaaaacttagtaacgttccgggtatacaacagttaggacctttgttcaaaacttccgacgtcgttgaactcac

SEQ ID NO: 1376 - DNA, 180 bp, Diabrotica virgifera
agttgcactataacgaaaccggtaccacatatgtagtagttaagttgcctgatgatgatctccccaactctgttggtacgtgtggagccgtgttgaagttcttagtgaaagattgtgatccatcaacgggaataccagattctgatgagggttacgatgatgaatatacactggaagaca

SEQ ID NO: 1377 - DNA, 600 bp, Diabrotica virgifera
ggggctttctgatttttgacagcttctatagaagtttatcaagatgttgatgccaaaaaagaatagagtatgtatttacgaatacctcttcaaagagggagtcatggtagctaaaaaagattaccatgccccaaaacacctcgaactagaaactatccctaaccttcaagtaattaaggctttacaatcacttaaatcaaaaggttacgtaaaggaacaattcgcctggaggcattattattggtatttgactaactctggcatcgaatacctccgcacattcttacacttacctggagaaattgtcccatctaccttgaaacgcccagcaaggacagaaaccacccgtcctagaccagctgctctcagatctgagacatctaaaccttcagaagaccgtgcaggatacagaaggactcctggaggccctggagctgacaagaaagctgatgttggtccaggaactggagatgttgagttcaggcaaggattcggacgtggacgggcaccacaataaatttattgataagttaatttttataaattgatcagccaataaaaagtttggttaaaaaaaaaaaaaaaaaaaaaaaaaaaaaa

1. A DNA construct comprising i) a nucleic acid molecule encoding a IPD079 polypeptide having insecticidal activity and ii) a silencing element targeting a polynucleotide having 95% identity to any one of set forth in SEQ ID NOs: 1279, 1280, 1337, 1338, or 1341 having insecticidal activity.

2. The DNA construct of claim 1, wherein the nucleic acid molecule encoding the IPD079 polypeptide and silencing element are operably linked to a heterologous regulatory element.

3. The DNA construct of claim 1, wherein the silencing element is a sense suppression element, an antisense suppression element, a double stranded RNA, a siRNA, a amiRNA, a miRNA, or a hairpin suppression element.

4. A molecular stack comprising i) a nucleic acid molecule encoding a IPD079 polypeptide having insecticidal activity and ii) a silencing element targeting a polynucleotide having 95% identity to any one of the polynucleotide sequences set forth in SEQ ID NOs: 1279, 1280, 1337, 1338, or 1341 having insecticidal activity.

5. The molecular stack of claim 4, wherein the nucleic acid molecule encoding the IPD079 polypeptide and silencing element are operably linked to a heterologous regulatory element.

6. The molecular stack of claim 4, wherein the silencing element is a sense suppression element, an antisense suppression element, a double stranded RNA, a siRNA, a amiRNA, a miRNA, or a hairpin suppression element.

7. A breeding stack comprising i) a nucleic acid molecule encoding a IPD079 polypeptide having insecticidal activity and ii) a silencing element targeting a polynucleotide having 95% identity to any one of set forth in SEQ ID NOs: 1279, 1280, 1337, 1338, or 1341 having insecticidal activity.

8. The breeding stack of claim 7, wherein the nucleic acid molecule encoding the IPD079 polypeptide and the silencing element are each operably linked to a heterologous regulatory element.

9. The breeding stack of claim 7, wherein the silencing element is a sense suppression element, an antisense suppression element, a double stranded RNA, a siRNA, a amiRNA, a miRNA, or a hairpin suppression element.

10. A transgenic plant or progeny thereof comprising the DNA construct of claim 1.

11. A transgenic plant or progeny thereof comprising the molecular stack of claim 4.

12. A transgenic plant or progeny thereof comprising the breeding stack of claim 7.

13. A composition comprising i) a nucleic acid molecule encoding a IPD079 polypeptide having insecticidal activity and ii) a silencing element targeting a polynucleotide having 95% identity to any one of set forth in SEQ ID NOs: 1279, 1280, 1337, 1338, or 1341 having insecticidal activity.

14. The composition of claim 20, wherein the silencing element is a sense suppression element, an antisense suppression element, a double stranded RNA, a siRNA, a amiRNA, a miRNA, or a hairpin suppression element.

15. A method for controlling an insect pest population comprising contacting the insect pest population with the transgenic plant of claim 10.
